(19) United States
(12) Patent Application Publication
(10) Pub. No.: US 2024/0173430 A1
(43) Pub. Date: May 30, 2024

(54) BASE EDITING FOR TREATING HUTCHINSON-GILFORD PROGERIA SYNDROME

(71) Applicants: The Broad Institute, Inc., Cambridge, MA (US); Baylor College of Medicine, Houston, TX (US); Vanderbilt University, Nashville, TN (US); President and Fellows of Harvard College, Cambridge, MA (US)

(72) Inventors: David R. Liu, Cambridge, MA (US); Luke W. Koblan, Cambridge, MA (US); Jonathan D. Brown, Nashville, TN (US); Charles Yang Lin, Houston, TX (US)

(73) Assignees: The Broad Institute, Inc., Cambridge, MA (US); Baylor College of Medicine, Houston, TX (US); Vanderbilt University, Nashville, TN (US); President and Fellows of Harvard College, Cambridge, MA (US)

(21) Appl. No.: 17/273,688

(22) PCT Filed: Sep. 5, 2019
(86) PCT No.: PCT/US2019/049793

§ 371 Date: Mar. 4, 2021

Related U.S. Application Data
(60) Provisional application No. 62/727,500, filed on Sep. 5, 2018.

(51) Int. Cl. A61K 48/00; A61K 38/17; A61P 9/00; C12N 7/00; C12N 9/22; C12N 9/80; C12N 15/11

(52) U.S. Cl. CPC A61K 48/005; A61K 38/1709; A61P 9/00; C12N 7/00; C12N 9/22; C12N 9/80; C12N 15/111; C12N 2310/20; C12Y 305/04004

(57) ABSTRACT

The disclosure provides adenosine deaminases that are capable of deaminating adenosine in DNA to treat Hutchin-son-Gilford progeria syndrome (HOPS). The disclosure also provides fusion proteins, guide RNAs and compositions comprising a Cas9 (e.g., a Cas9 nickase) domain and adenosine deaminases that deaminate adenosine in DNA, for example in a LNA gene. In some embodiments, adenosine deaminases provided herein are used to correct a C1824T mutation in LMNA. In some embodiments, the methods and compositions provided herein are used to treat Hutchinson-Gilford progeria syndrome (HGPS).

### RELATED APPLICATIONS

[0001] This application is a national stage filing under 35 U.S.C. § 371 of International PCT Application PCT/US2019/049793, filed Sep. 5, 2019, which claims priority under 35 U.S.C. § 119(e) to U.S. Provisional application, U.S. Ser. No. 62/727,500, filed on Sep. 5, 2018, each of which is incorporated herein by reference.

### GOVERNMENT SUPPORT

[0002] This invention was made with government support under HR0011-17-2-0049, HG009490 and DGE1144152 awarded by DARPA, CEGS and NSF. The government has certain rights in the invention.

### REFERENCE TO A SEQUENCE LISTING SUBMITTED AS A TEXT FILE VIA EFS-WEB

[0003] This application contains a Sequence Listing which has been submitted in ASCII format via EFS-Web and is hereby incorporated by reference in its entirety. Said ASCII copy, created on Apr. 5, 2021, is named B119570059US01-SUBSEQ-EPG and is 671 kilobytes in size.

### BACKGROUND OF THE INVENTION

[0004] Targeted editing of nucleic acid sequences, for example, the targeted cleavage or the targeted introduction of a specific modification into genomic DNA, is a highly promising approach for the study of gene function and also has the potential to provide new therapies for human genetic diseases. Since many genetic diseases in principle can be treated by effecting a specific nucleotide change at a specific location in the genome (for example, an A to G or a T to C change in a specific codon of a gene associated with a disease), the development of a programmable way to achieve such precise gene editing represents both a powerful new research tool, as well as a potential new approach to gene editing-based therapeutics.

### SUMMARY OF THE INVENTION

[0005] Provided herein are compositions, kits, and methods of modifying a polynucleotide (e.g., DNA) using an adenosine deaminase and a nucleic acid programmable DNA binding protein (e.g., Cas9), for example to treat Progeria. Hutchinson-Gilford Progeria Syndrome (HGPS) is a rare autosomal dominant genetic disorder (approximately 1 case per 8 million newborns) caused by a de novo germline point mutationin in the gene LMNA, which encodes the proteins Lamin A and Lamin C. HGPS is typically diagnosed during infancy and cardiovascular dysfunction is a primary cause of morbidity and mortality. The most frequent HGPS mutation occurs in exon 11 of the LMNA gene. This synonymous mutation of the cytosine to thymine (C1824T) activates a cryptic exonic donor splice site and leads to alternative splicing of the preLamin A mRNA and deletion of the last 150 base pairs in exon 11. Normal maturation of preLamin A requires farnesylation of the C-terminus followed by cleavage of this region. Progerin, the mutant protein, lacks this cleavage site and remains farnesylated. The mutant progerin protein is causal for HGPS disease phenotypes.

[0006] Aspects of the disclosure provide compositions, kits, and methods for modifying a polynucleotide (e.g., DNA) using an adenosine deaminase and a nucleic acid programmable DNA binding protein (e.g., Cas9) to correct one or more mutations associated with HGPS. Such adenosine deaminases are described in International Application No.: PCT/US2017/045,381, filed Aug. 3, 2017; the entire contents of which are hereby incorporated by reference. In some embodiments, fusion proteins provided herein (e.g., adenosine base editors) are used to correct a point mutation in a LMNA gene. For example, the disclosure provides methods and compositions for correcting a C1824T mutation in an LMNA gene. A skilled artisan would appreciate that a C1824T mutation results in mRNA mis-splicing and stably farnexylated mutant lamin A (progerin). In some embodiments, the fusion protein (e.g., adenosine base editor) is delivered in vivo, to a subject. In some embodiments, the fusion protein is delivered in two parts, for example by using a split-intein strategy. In some embodiments, correction of a C1824T mutation results in a decrease, e.g., at least 5%, 10%, 20%, 30%, 40%, 50%, 60%, 70%, 80%, 90%, or 95% decrease in a level of mutant progerin in a subject, in an organ of a subject (e.g., heart or liver), or in a cell of a subject.

[0007] In some embodiments, the disclosure provides compositions comprising a fusion protein (e.g., adenosine base editor) and a guide RNA (gRNA). In some embodiments, the gRNA directs the fusion protein in proximity to a point mutation in a gene associated with HGPS, for example a LMNA gene. In some embodiments, the gRNA directs the fusion protein within 1, 2, 3, 4, 5, 6, 7, 8, 9, 10, 11, 12, 13, 14, 15, 16, 17, 18, 19, or 20 base pairs of a point mutation within a LMNA gene. In some embodiments, the gRNA comprises the sequence 5′-GGTCCACCCACCTGGGCTCC-3′ (SEQ ID NO: 37), where the nucleotide target is indicated in bold. It should be appreciated that the T's indicated in the gRNA sequence are uricils (Us) in the RNA sequence. Accordingly, in some embodiments, the gRNA comprises the sequence 5′-GGUCCACCCACCUGGGCUCC-3′ (SEQ ID NO: 36). Methods and compositions provided herein, in some embodiments, are used to treat a subject having or a subject suspected of having HGPS.

[0008] Thus, in some aspects, the base editor and guide RNA complexes described herein may be useful for treating a disease or a disorder caused by a C to T mutation in a LMNA gene. In some embodiments, the disorder is Hutchinson-Gilford progeria syndrome (HGPS). In some embodiments, deaminating the adenosine nucleobase in the LMNA gene results in a T-A base pair in the LMNA gene being mutated to a C-G base pair in the LMNA gene. In some embodiments, deaminating the adenosine nucleobase in the LMNA gene leads to a decrease in mutant lamin A (progerin). In some embodiments, deaminating the adenosine nucleobase in the LMNA gene results in correcting a sequence associated with HGPS. In some embodiments, deaminating the adenosine nucleobase in the LMNA gene ameliorates one or more symptoms of HGPS.

[0009] In some embodiments, the LMNA is lamin A/C from Homo sapiens. For example, Gene ID: 4000, which may also be referred to as FPL; IDC; LFP; CDDC; EMD2; FPLD; HGPS; LDP1; LMN1; LMNC; MADA; PRO1; CDCD1; CMD1A; FPLD2; LMNL1; CMT2B1; or LGMD1B. See, for example, 1.NG_008692.2 RefSeqGene.

### BRIEF DESCRIPTION OF THE DRAWINGS

[0010] FIG. 1 summarizes the use of base editing to address progeria. Included is a schematic representation of exon splicing of LMNA mRNA between Exon 11 and Exon 12. HGPS is commonly caused by a C1824T mutation which results in mRNA mis-splicing.

[0011] FIG. 2 shows ABEmax correction of a LMNA progerin allele. FIG. 2A provides a schematic representation in which HGPS patient-derived fibroblasts are infected with an ABEmax base editor and sgRNA targeting c.1824, thereby generating a wild-type LMNA mRNA and wild-type Lamin A protein. FIG. 2B provides data demonstrating that treating two different HPGS patient-derived cell lines (HGADFN167 and HGADFN188, respectively) with ABEmax, targeting the mutant T1824 allele, leads to an increase in the proportion of wild-type C1824 alleles and a decrease in mutant T1824 alleles.

[0012] FIG. 3 shows AAV-mediated in vivo somatic cell base editing of LMNA restores lamin mRNA and protein. FIG. 3A shows a schematic representation of an optimized dual split-ABEmax AAV9 construct (ITR=inverted terminal repeats). FIG. 3B shows a schematic representation of homozygous human LMNA C1824T knock-in mice, which are injected with a split-ABEmax AAV9 at 4 weeks (wks) and are assayed at 8 weeks (wks). FIG. 3C provides data showing the % T to C correction at c.1824 in four different tissues (heart, liver, skeletal muscle and aorta). FIG. 3D provides data showing an increase in full length LMNA mRNA in the liver and heart of treated mice. FIG. 3E provides data showing an increase in wild-type Lamin A protein in the liver and heart of treated mice. The data demonstrate that ABEmax AAV9 is capable of correcting a C1824T mutation in mouse heart, liver, skeletal muscle, and aorta. The data also demonstrate that ABEmax AAV9 is capable of restoring Lamin A mRNA and Protein.

[0013] FIG. 4 shows ABEmax correction of a LMNA progerin allele. The data demonstrates that treating two different HPGS patient-derived cell lines, cell line 1 (HGADFN167) and cell line 2 (HGADFN188) with ABEmax, targeting the mutant T1824 allele, leads to an increase in the proportion of wild-type C1824 alleles and a decrease in mutant T1824 alleles at both 10 and 20 days following treatment. For both bar graphs, the left bar represents untreated cells, the middle bar indicates 10 days following treatment, and the right bar indicates 20 days following treatment.

[0014] FIG. 5 shows data demonstrating that ABEmax editing substantially reduces progerin expression in patient fibroblasts. FIG. 5A shows RNA sequencing data (RNAseq) demonstrating 95.5% editing in the HGADFN167 cell line after 20 days, indicating a 91% allele correction. FIG. 5B shows a Western blot of HGADFN 167 (indicated as HGPS #167) and HGADFN 188 (indicated as HGPS #188) cell lines 20 days following treatment with ABEmax, targeting the mutant T1824 allele, indicating that editing both cell lines leads to correction at the protein level.

[0015] FIG. 6 shows data demonstrating that off target effects on DNA across 31 genomic loci are below the detection limit. DNA off-target editing was determined using circle-seq for both the HGADFN 167 and HGADFN188 cell lines treated with a Cas9 nuclease (VRQR variant), that was used in the base editor. Looking at the top 31 off target loci, no off-target editing was observed above background.

[0016] FIG. 7 shows data demonstrating that off-target effects on RNA are not statistically significant in ABEmax-treated fibroblasts. RNA off-target editing was determined by doing RNAseq on both the HGADFN167 and HGADFN188 cell lines after 20 days. No significant RNA A to I editing relative to untreated controls (as determined by the percent of the transcriptome in which there was a modified A to I) was observed.

### DEFINITIONS

[0017] As used herein and in the claims, the singular forms “a,” “an,” and “the” include the singular and the plural unless the context clearly indicates otherwise. Thus, for example, a reference to “an agent” includes a single agent and a plurality of such agents.

[0018] The term “Hutchinson-Gilford progeria syndrome,” or “HGPS,” refers to the rare autosomal dominant genetic disorder in which symptoms resembling aspects of aging are manifested at an early age. The cause of HGPS (commonly referred to as progeria) was discovered to be a point mutation in position 1824 of the LMNA gene, which replaces a cytosine with thymine. See e.g., De Sandre-Giovannoli, A., et al., “Lamin A truncation in Hutchinson-Gilford progeria.” Science 2003 June, 300 (5628): 2055; and Eriksson M., et al., “Recurrent de novo point mutations in lamin A cause Hutchinson-Gilford progeria syndrome” Nature, 2003 May 15; 423(6937):293-8; the entire contents of each of which are incorporated herein by reference. This mutation creates a 5′ cryptic splice site within exon 11, resulting in a shorter than normal mRNA transcript. Without wishing to be bound by any particular theory, when this shorter mRNA is translated into protein, it produces an abnormal variant of the prelamin A protein, referred to as progerin. Progerin's farnesyl group cannot be removed, so the abnormal protein is permanently attached to the nuclear rim, and it cannot become incorporated as a structural part of the nuclear lamina. Without lamin A protein, the nuclear lamina does not provide the nuclear envelope with enough structural support, causing it to take on an abnormal shape. See, e.g., Cao, K., et al., “Rapamycin Reverses Cellular Phenotypes and Enhances Mutant Protein Clearance in Hutchinson-Gilford Progeria Syndrome Cells.” Science Translational Medicine, 2011 Jun. 29; 3(89):89ra58.

[0019] The term “deaminase” or “deaminase domain” refers to a protein or enzyme that catalyzes a deamination reaction. In some embodiments, the deaminase is an adenosine deaminase, which catalyzes the hydrolytic deamination of adenine or adenosine. In some embodiments, the deaminase or deaminase domain is an adenosine deaminase, catalyzing the hydrolytic deamination of adenosine or deoxyadenosine to inosine or deoxyinosine, respectively. In some embodiments, the adenosine deaminase catalyzes the hydrolytic deamination of adenine or adenosine in deoxyribonucleic acid (DNA). The adenosine deaminases (e.g. engineered adenosine deaminases, evolved adenosine deaminases) provided herein may be from any organism, such as a bacterium. In some embodiments, the deaminase or deaminase domain is a variant of a naturally-occurring deaminase from an organism. In some embodiments, the deaminase or deaminase domain does not occur in nature.

[0020] As used herein, an “adenosine deaminase” is an enzyme that catalyzes the deamination of adenosine, converting it to the nucleoside inosine. Under standard Watson-Crick hydrogen bond pairing, an adenosine base hydrogen bonds to a thymine base (or a uracil in case of RNA). When adenine is converted to inosine, the inosine undergoes hydrogen bond pairing with cytosine. Thus, a conversion of “A” to inosine by adenosine deaminase will cause the insertion of “C” instead of a “T” during cellular repair and/or replication processes. Since the cytosine “C” pairs with guanine “G”, the adenosine deaminase in coordination with DNA replication causes the conversion of an A·T pairing to a C·G pairing in the double-stranded DNA molecule.

[0021] As used herein, “base editing” is a genome editing technology that involves the conversion of a specific nucleic acid base into another at a targeted genomic locus. In certain aspects, this can be achieved without requiring double-stranded DNA breaks (DSB). Since many genetic diseases arise from point mutations, this technology has important implications in the study of human health and disease.

[0022] To date, other genome editing techniques, including CRISPR-based systems, begin with the introduction of a DSB at a locus of interest. Subsequently, cellular DNA repair enzymes mend the break, commonly resulting in random insertions or deletions (indels) of bases at the site of the DSB. However, when the introduction or correction of a point mutation at a target locus is desired rather than stochastic disruption of the entire gene, these genome editing techniques are unsuitable, as correction rates are low (e.g., typically 0.1% to 5%), with the major genome editing products being indels. In order to increase the efficiency of gene correction without simultaneously introducing random indels, the present inventors previously modified the CRISPR/Cas9 system to directly convert one DNA base into another without DSB formation.

[0023] The term “base editors (BEs)” or “nucleobase editors (NBEs)” as used herein, refers to an agent comprising a polypeptide that is capable of making a modification to a base (e.g., A, T, C, G, or U) within a nucleic acid sequence (e.g., DNA or RNA), for example, any of the Cas9 fusion proteins provided herein. In some embodiments, the base editor is capable of deaminating a base within a nucleic acid. In some embodiments, the base editor is capable of deaminating a base within a DNA molecule. In some embodiments, the base editor is capable of deaminating an adenine (A) in DNA. In some embodiments, the base editor is a fusion protein comprising a nucleic acid programmable DNA binding protein (napDNAbp) fused to an adenosine deaminase. In some embodiments, the base editor is a Cas9 protein fused to an adenosine deaminase. In some embodiments, the base editor is a Cas9 nickase (nCas9) fused to an adenosine deaminase. In some embodiments, the base editor is a nuclease-inactive Cas9 (dCas9) fused to an adenosine deaminase. In some embodiments, the fusion protein comprises a nuclease-inactive Cas9 (dCas9) fused to a deaminase which still binds DNA in a guide RNA-programmed manner via the formation of an R-loop, but does not cleave the DNA backbone. For example, the dCas9 of the fusion protein can comprise a D10A and a H840A mutation (which renders Cas9 capable of cleaving only one strand of a nucleic acid duplex) as described in PCT/US2016/058344 (published as WO 2017/070632), which is incorporated herein by reference in its entirety. In some embodiments, the fusion protein comprises a Cas9 or Cas9 nickase (nCas9) fused to an adenosine deaminase. Base editors comprising an adenosine deaminase (e.g., adenosine base editors) have been described in PCT/US2017/045381 (published as WO 2018/027078); PCT/US2018/056146 (published as WO 2019/079347); and PCT/2019/033848; the entire contents of each of which are incorporated herein by reference. Exemplary adenosine base editors include, without limitation ABE 7.10 and ABEmax (7.10). Other base editors include cytidine base editors, which, in some embodiments, are fusion proteins comprising a Cas9 nickase fused to a deaminase, e.g., a cytidine deaminase (rAPOBEC1) which converts a DNA base cytosine to uracil. One such base editor is referred to as “BE1” in the literature. In some embodiments, the fusion protein comprises a nuclease-inactive Cas9 fused to a deaminase and further fused to a UGI domain (uracil DNA glycosylase inhibitor, which prevents the subsequent U:G mismatch from being repaired back to a C:G base pair). One such base editor is referred to as “BE2” in the literature. In other embodiments, to improve base editing efficiency, the catalytic His residue at position 840 in the Cas9 HNH domain of BE2 can be restore (resulting in “BE3” as described in the literature), which nicks only the non-edited strand, simulating newly synthesized DNA and leading to the desired U:A product. In other embodiments, the dCas9 is any dCas9 disclosed or described in PCT/US2017/045381 (published as WO 2018/027078), which is incorporated herein by reference in its entirety. The terms “nucleobase editors (NBEs)” and “base editors (BEs)” may be used interchangeably. The term “base editors” encompasses any base editor known or described in the art at the time of this filing, but also the improved base editors described herein. The base editors known in the state of the art which may be modified by the methods and strategies described herein to improve editing efficiency include, for example, BE1, BE2, BE3, or BE4.

[0024] The term “Cas9” or “Cas9 nuclease” or “Cas9 moiety” refers to a CRISPR associated protein 9, or functional fragment thereof, and embraces any naturally occurring Cas9 from any organism, any naturally-occurring Cas9 equivalent or functional fragment thereof, any Cas9 homolog, ortholog, or paralog from any organism, and any mutant or variant of a Cas9, naturally-occurring or engineered. More broadly, a Cas9 is a type of “RNA-programmable nuclease” or “RNA-guided nuclease” or more broadly a type of “nucleic acid programmable DNA binding protein (napDNAbp)”. The term Cas9 is not meant to be particularly limiting and may be referred to as a “Cas9 or equivalent.” Exemplary Cas9 proteins are further described herein and/or are described in the art and are incorporated herein by reference. The present disclosure is unlimited with regard to the particular Cas9 that is employed in the improved base editors of the invention.

[0025] As used herein, the term “dCas9” refers to a nuclease-inactive Cas9 or nuclease-dead Cas9, or a functional fragment thereof, and embraces any naturally occurring dCas9 from any organism, any naturally-occurring dCas9 equivalent or functional fragment thereof, any dCas9 homolog, ortholog, or paralog from any organism, and any mutant or variant of a dCas9, naturally-occurring or engineered. The term dCas9 is not meant to be particularly limiting and may be referred to as a “dCas9 or equivalent.” Exemplary dCas9 proteins and method for making dCas9 proteins are further described herein and/or are described in the art and are incorporated herein by reference.

[0026] As used herein, the term “CRISPR” refers to a family of DNA sequences (i.e., CRISPR clusters) in bacteria and archaea that represent snippets of prior infections by a virus that have invaded the prokaryote. The snippets of DNA are used by the prokaryotic cell to detect and destroy DNA from subsequent attacks by similar viruses and effectively compose, along with an array of CRISPR-associated proteins (including Cas9 and homologs thereof) and CRISPR-associated RNA, a prokaryotic immune defense system. In nature, CRISPR clusters are transcribed and processed into CRISPR RNA (crRNA). In certain types of CRISPR systems (e.g., type II CRISPR systems), correct processing of pre-crRNA requires a trans-encoded small RNA (tracrRNA), endogenous ribonuclease 3 (rnc) and a Cas9 protein. The tracrRNA serves as a guide for ribonuclease 3-aided processing of pre-crRNA. Subsequently, Cas9/crRNA/tracrRNA endonucleolytically cleaves linear or circular dsDNA target complementary to the RNA. Specifically, the target strand not complementary to crRNA is first cut endonucleolytically, then trimmed 3′-5′ exonucleolytically. In nature, DNA-binding and cleavage typically requires protein and both RNAs. However, single guide RNAs (“sgRNA”, or simply “gNRA”) can be engineered so as to incorporate aspects of both the crRNA and tracrRNA into a single RNA species—the guide RNA. See, e.g., Jinek M., Chylinski K., Fonfara I., Hauer M., Doudna J. A., Charpentier E. Science 337:816-821(2012), the entire contents of which is hereby incorporated by reference. Cas9 recognizes a short motif in the CRISPR repeat sequences (the PAM or protospacer adjacent motif) to help distinguish self versus non-self. CRISPR biology, as well as Cas9 nuclease sequences and structures are well known to those of skill in the art (see, e.g., “Complete genome sequence of an M1 strain of Streptococcus pyogenes.” Ferretti et al., J. J., McShan W. M., Ajdic D. J., Savic D. J., Savic G., Lyon K., Primeaux C., Sezate S., Suvorov A. N., Kenton S., Lai H. S., Lin S. P., Qian Y., Jia H. G., Najar F. Z., Ren Q., Zhu H., Song L., White J., Yuan X., Clifton S. W., Roe B. A., McLaughlin R. E., Proc. Natl. Acad. Sci. U.S.A. 98:4658-4663(2001); “CRISPR RNA maturation by trans-encoded small RNA and host factor RNase III.” Deltcheva E., Chylinski K., Sharma C. M., Gonzales K., Chao Y., Pirzada Z. A., Eckert M. R., Vogel J., Charpentier E., Nature 471:602-607(2011); and “A programmable dual-RNA-guided DNA endonuclease in adaptive bacterial immunity.” Jinek M., Chylinski K., Fonfara I., Hauer M., Doudna J. A., Charpentier E. Science 337:816-821(2012), the entire contents of each of which are incorporated herein by reference). Cas9 orthologs have been described in various species, including, but not limited to, S. pyogenes and S. thermophilus. Additional suitable Cas9 nucleases and sequences will be apparent to those of skill in the art based on this disclosure, and such Cas9 nucleases and sequences include Cas9 sequences from the organisms and loci disclosed in Chylinski, Rhun, and Charpentier, “The tracrRNA and Cas9 families of type II CRISPR-Cas immunity systems” (2013) RNA Biology 10:5, 726-737; the entire contents of which are incorporated herein by reference.

[0027] As used herein, the term “deaminase” or “deaminase domain” or “deaminase moiety” refers to a protein or enzyme that catalyzes a deamination reaction. In some embodiments, the deaminase is an adenosine deaminase, which catalyzes the hydrolytic deamination of adenine or adenosine (e.g., an engineered adenosine deaminase that deaminates adenosine in DNA). In some embodiments, the deaminase or deaminase domain is a cytidine deaminase, catalyzing the hydrolytic deamination of cytidine or deoxycytidine to uridine or deoxyuridine, respectively. In some embodiments, the deaminase or deaminase domain is a cytidine deaminase domain, catalyzing the hydrolytic deamination of cytosine to uracil. In some embodiments, the deaminase or deaminase domain is a naturally-occurring deaminase from an organism, such as a human, chimpanzee, gorilla, monkey, cow, dog, rat, or mouse. In some embodiments, the deaminase or deaminase domain is a variant of a naturally-occurring deaminase from an organism that does not occur in nature. For example, in some embodiments, the deaminase or deaminase domain is at least 50%, at least 55%, at least 60%, at least 65%, at least 70%, at least 75% at least 80%, at least 85%, at least 90%, at least 95%, at least 96%, at least 97%, at least 98%, at least 99%, or at least 99.5% identical to a naturally-occurring deaminase from an organism. The term deaminase also embraces any genetically engineered deaminase that may comprise genetic modifications (e.g., one or more mutations) that results in a variant deaminase having an amino acid sequence comprising one or more changes relative to a wildtype counterpart deaminase. Examples of deaminases (e.g., adenosine deaminases) are provided herein, and the term is not meant to be limiting.

[0028] The term “effective amount,” as used herein, refers to an amount of a biologically active agent that is sufficient to elicit a desired biological response. For example, in some embodiments, an effective amount of a base editor may refer to the amount of the base editor that is sufficient to edit a target site nucleotide sequence, e.g., a genome. In some embodiments, an effective amount of a base editor provided herein, e.g., of a fusion protein comprising a Cas9 nickase domain (nCas9) and a nucleic acid editing domain (e.g., an adenosine deaminase domain) may refer to the amount of the fusion protein that is sufficient to induce editing of a target site specifically bound and edited by the fusion protein. As will be appreciated by the skilled artisan, the effective amount of an agent, e.g., a fusion protein, a nuclease, a deaminase, a hybrid protein, a protein dimer, a complex of a protein (or protein dimer) and a polynucleotide, or a polynucleotide, may vary depending on various factors as, for example, on the desired biological response, e.g., on the specific allele, genome, or target site to be edited, on the cell or tissue being targeted, and on the agent being used.

[0029] As used herein, the term “isolated protein” or “isolated nucleic acid” refers to a protein or nucleic acid that by virtue of its origin or source of derivation is not associated with naturally associated components that accompany it in its native state; is substantially free of other proteins or nucleic acids from the same species; is expressed by a cell from a different species; or does not occur in nature. Thus, a polypeptide or nucleic acid that is chemically synthesized or synthesized in a cellular system different from the cell from which it naturally originates will be “isolated” from its naturally associated components. A protein or nucleic acid may also be rendered substantially free of naturally associated components by isolation, using protein purification techniques well known in the art. In some embodiments, a protein is isolated if it makes up at least 70%, 75%, 80%, 85%, 90%, 95%, 98%, or 99% of the proteins in an isolate. In some embodiments, a nucleic acid is isolated if it makes up at least 70%, 75%, 80%, 85%, 90%, 95%, 98%, or 99% of the nucleic acids in an isolate.

[0030] The term “linker,” as used herein, refers to a chemical group or a molecule linking two molecules or moieties, e.g., a binding domain and a cleavage domain of a nuclease. In some embodiments, a linker joins a gRNA binding domain of an RNA-programmable nuclease and the catalytic domain of a deaminase. In some embodiments, a linker joins a nCas9 and base editor moiety (e.g., an adenosine deaminase). Typically, the linker is positioned between, or flanked by, two groups, molecules, or other moieties and connected to each one via a covalent bond, thus connecting the two. In some embodiments, the linker is an amino acid or a plurality of amino acids (e.g., a peptide or protein). In some embodiments, the linker is an organic molecule, group, polymer, or chemical moiety. In some embodiments, the linker is 2-100 amino acids in length, for example, 3, 4, 5, 6, 7, 8, 9, 10, 11, 12, 13, 14, 15, 16, 17, 18, 19, 20, 21, 22, 23, 24, 25, 26, 27, 28, 29, 30, 30-35, 35-40, 40-45, 45-50, 50-60, 60-70, 70-80, 80-90, 90-100, 100-150, or 150-200 amino acids in length. Longer or shorter linkers are also contemplated.

[0031] The term “mutation,” as used herein, refers to a substitution of a residue within a sequence, e.g., a nucleic acid or amino acid sequence, with another residue, or a deletion or insertion of one or more residues within a sequence. Mutations are typically described herein by identifying the original residue followed by the position of the residue within the sequence and by the identity of the newly substituted residue. Various methods for making the amino acid substitutions (mutations) provided herein are well known in the art, and are provided by, for example, Green and Sambrook, Molecular Cloning: A Laboratory Manual (4^{th} ed., Cold Spring Harbor Laboratory Press, Cold Spring Harbor, N.Y. (2012)). Mutations can include a variety of categories, such as single base polymorphisms, microduplication regions, indel, and inversions, and is not meant to be limiting in any way. Mutations can include “dominant” mutations, in which one mutant allele of a gene on a chromosome masks or overrides the effect of a different variant (e.g., the wild-type version) of the same gene on the other copy of the chromosome. One such example of a dominant mutation is Hutchinson-Gilford progeria syndrome (HGPS), in which a point mutationin the LMNA gene (e.g., at position 1824 replacing a cytosine with thymine) creates a 5′ cryptic splice site within exon 11, resulting in a shorter than normal mRNA transcript. When this shorter mRNA is translated into protein, it produces an abnormal variant of the prelamin A protein, referred to as progerin, which causes abnormalities in the shape of the nucleus within cells and manifests in patients as HGPS. Mutations can include “loss-of-function” mutations which is the normal result of a mutation that reduces or abolishes a protein activity. Most loss-of-function mutations are recessive, because in a heterozygote the second chromosome copy carries an unmutated version of the gene coding for a fully functional protein whose presence compensates for the effect of the mutation. There are some exceptions where a loss-of-function mutation is dominant, one example being one example being haploinsufficiency, where the organism is unable to tolerate the approximately 50% reduction in protein activity suffered by the heterozygote. This is the explanation for a few genetic diseases in humans, including Marfan syndrome which results from a mutation in the gene for the connective tissue protein called fibrillin. Mutations also embrace “gain-of-function” mutations, which is one which confers an abnormal activity on a protein or cell that is otherwise not present in a normal condition. Many gain-of-function mutations are in regulatory sequences rather than in coding regions, and can therefore have a number of consequences. For example, a mutation might lead to one or more genes being expressed in the wrong tissues, these tissues gaining functions that they normally lack. Alternatively the mutation could lead to overexpression of one or more genes involved in control of the cell cycle, thus leading to uncontrolled cell division and hence to cancer. Because of their nature, gain-of-function mutations are usually dominant.

[0032] The terms “non-naturally occurring” or “engineered” are used interchangeably and indicate the involvement of the hand of man. The terms, when referring to nucleic acid molecules or polypeptides (e.g., Cas9 or deaminases) mean that the nucleic acid molecule or the polypeptide is at least substantially free from at least one other component with which they are naturally associated in nature and/or as found in nature (e.g., an amino acid sequence not found in nature). These terms also embrace nucleic acid molecules and polypeptides that have been altered (e.g., mutated), such that they are different from nucleic acid molecules or polypeptides that occur in nature.

[0033] The terms “nucleic acid” and “nucleic acid molecule,” as used herein, refer to a compound comprising a nucleobase and an acidic moiety, e.g., a nucleoside, a nucleotide, or a polymer of nucleotides. Typically, polymeric nucleic acids, e.g., nucleic acid molecules comprising three or more nucleotides are linear molecules, in which adjacent nucleotides are linked to each other via a phosphodiester linkage. In some embodiments, “nucleic acid” refers to individual nucleic acid residues (e.g. nucleotides and/or nucleosides). In some embodiments, “nucleic acid” refers to an oligonucleotide chain comprising three or more individual nucleotide residues.

[0034] The term “nucleic acid programmable DNA/RNA binding protein (napDNA/RNAbp)” refers to any protein that may associate (e.g., form a complex) with one or more nucleic acid molecules (i.e., which may broadly be referred to as a “napDNA/RNAbp-programming nucleic acid molecule” and includes, for example, a guide RNA in the case of Cas systems) which direct or otherwise program the protein to localize to a specific target nucleotide sequence (e.g., a gene locus of a genome) that is complementary to the one or more nucleic acid molecules (or a portion or region thereof) associated with the protein, thereby causing the protein to bind to the nucleotide sequence at the specific target site. This term napDNA/RNAbp embraces CRISPR Cas 9 proteins, as well as Cas9 equivalents, homologs, orthologs, or paralogs, whether naturally occurring or non-naturally occurring (e.g., engineered or recombinant), and may include a Cas9 equivalent from any type of CRISPR system (e.g., type II, V, VI), including Cpf1 (a type-V CRISPR-Cas systems), C2c1 (a type V CRISPR-Cas system), C2c2 (a type VI CRISPR-Cas system) and C2c3 (a type V CRISPR-Cas system). Further Cas-equivalents are described in Makarova et al., “C2c2 is a single-component programmable RNA-guided RNA-targeting CRISPR effector,” Science 2016; 353(6299), the contents of which are incorporated herein by reference. However, the nucleic acid programmable DNA binding protein (napDNAbp) that may be used in connection with this invention are not limited to CRISPR-Cas systems. The invention embraces any such programmable protein, such as the Argonaute protein from Natronobacterium gregoryi (NgAgo) which may also be used for DNA-guided genome editing. NgAgo-guide DNA system does not require a PAM sequence or guide RNA molecules, which means genome editing can be performed simply by the expression of generic NgAgo protein and introduction of synthetic oligonucleotides on any genomic sequence. See Gao F, Shen X Z, Jiang F, Wu Y, Han C. DNA-guided genome editing using the Natronobacterium gregoryi Argonaute. Nat Biotechnol 2016; 34(7):768-73, which is incorporated herein by reference.

[0035] The term “napDNA/RNAbp-programming nucleic acid molecule” or equivalently “guide sequence” refers the one or more nucleic acid molecules which associate with and direct or otherwise program a napDNA/RNAbp protein to localize to a specific target nucleotide sequence (e.g., a gene locus of a genome) that is complementary to the one or more nucleic acid molecules (or a portion or region thereof) associated with the protein, thereby causing the napR/DNAbp protein to bind to the nucleotide sequence at the specific target site. A non-limiting example is a guide RNA of a Cas protein of a CRISPR-Cas genome editing system.

[0036] As used herein, the term “nuclear localization signal or sequence” or “NLS” is an amino acid sequence that tags, designates, or otherwise marks a protein for import into the cell nucleus by nuclear transport. Typically, this signal consists of one or more short sequences of positively charged lysines or arginines exposed on the protein surface. Different nuclear localized proteins may share the same NLS. An NLS has the opposite function of a nuclear export signal (NES), which targets proteins out of the nucleus. Thus, a single nuclear localization signal can direct the entity with which it is associated to the nucleus of a cell. Such sequences can be of any size and composition, for example more than 25, 25, 15, 12, 10, 8, 7, 6, 5 or 4 amino acids, but will preferably comprise at least a four to eight amino acid sequence known to function as a nuclear localization signal (NLS).

[0037] The term, as used herein, “nucleobase modification moiety” or equivalently a “nucleic acid effector domain” embraces any protein, enzyme, or polypeptide (or functional fragment thereof) which is capable of modifying a DNA or RNA molecule. Nucleobase modification moieties can be naturally occurring, or can be recombinant. For example, a nucleobase modification moiety can include one or more DNA repair enzymes, for example, and an enzyme or protein involved in base excision repair (BER), nucleotide excision repair (NER), homology-dependent recombinational repair (HR), non-homologous end-joining repair (NHEJ), microhomology end-joining repair (MMEJ), mismatch repair (MMR), direct reversal repair, or other known DNA repair pathway. A nucleobase modification moiety can have one or more types of enzymatic activities, including, but not limited to endonuclease activity, polymerase activity, ligase activity, replication activity, proofreading activity. Nucleobase modification moieties can also include DNA or RNA-modifying enzymes and/or mutagenic enzymes, such as, DNA methylases and deaminating enzymes (i.e., deaminases, including cytidine deaminases and adenosine deaminases, all defined above), which deaminate nucleobases leading in some cases to mutagenic corrections by way of normal cellular DNA repair and replication processes. The “nucleic acid effector domain” (e.g., a DNA effector domain or an RNA effector domain) as used herein may also refer to a protein or enzyme capable of making one or more modifications (e.g., deamination of a cytidine residue) to a nucleic acid (e.g., DNA or RNA). Exemplary nucleic acid editing domains include, but are not limited to a deaminase, a nuclease, a nickase, a recombinase, a methyltransferase, a methylase, an acetylase, an acetyltransferase, a transcriptional activator, or a transcriptional repressor domain. In some embodiments the nucleic acid editing domain is a deaminase (e.g., an adenosine deaminase, such as a TadA-derived adenosine deaminase that deaminates an adenine in DNA).

[0038] As used herein, the terms “oligonucleotide” and “polynucleotide” can be used interchangeably to refer to a polymer of nucleotides (e.g., a string of at least three nucleotides). In some embodiments, “nucleic acid” encompasses RNA as well as single and/or double-stranded DNA. Nucleic acids may be naturally occurring, for example, in the context of a genome, a transcript, an mRNA, tRNA, rRNA, siRNA, snRNA, a plasmid, cosmid, chromosome, chromatid, or other naturally occurring nucleic acid molecule. On the other hand, a nucleic acid molecule may be a non-naturally occurring molecule, e.g., a recombinant DNA or RNA, an artificial chromosome, an engineered genome, or fragment thereof, or a synthetic DNA, RNA, DNA/RNA hybrid, or including non-naturally occurring nucleotides or nucleosides. Furthermore, the terms “nucleic acid,” “DNA,” “RNA,” and/or similar terms include nucleic acid analogs, e.g., analogs having other than a phosphodiester backbone. Nucleic acids can be purified from natural sources, produced using recombinant expression systems and optionally purified, chemically synthesized, etc. Where appropriate, e.g., in the case of chemically synthesized molecules, nucleic acids can comprise nucleoside analogs such as analogs having chemically modified bases or sugars, and backbone modifications. A nucleic acid sequence is presented in the 5′ to 3′ direction unless otherwise indicated. In some embodiments, a nucleic acid is or comprises natural nucleosides (e.g., adenosine, thymidine, guanosine, cytidine, uridine, deoxyadenosine, deoxythymidine, deoxyguanosine, and deoxycytidine); nucleoside analogs (e.g., 2-aminoadenosine, 2-thiothymidine, inosine, pyrrolo-pyrimidine, 3-methyl adenosine, 5-methylcytidine, 2-aminoadenosine, C5-bromouridine, C5-fluorouridine, C5-iodouridine, C5-propynyl-uridine, C5-propynyl-cytidine, C5-methylcytidine, 2-aminoadenosine, 7-deazaadenosine, 7-deazaguanosine, 8-oxoadenosine, 8-oxoguanosine, 0(6)-methylguanine, and 2-thiocytidine); chemically modified bases; biologically modified bases (e.g., methylated bases); intercalated bases; modified sugars (e.g., 2′-fluororibose, ribose, 2′-deoxyribose, arabinose, and hexose); and/or modified phosphate groups (e.g., phosphorothioates and 5′-N-phosphoramidite linkages).

[0039] The terms “protein,” “peptide,” and “polypeptide,” are used interchangeably herein, and refer to a polymer of amino acid residues linked together by peptide (amide) bonds. The terms refer to a protein, peptide, or polypeptide of any size, structure, or function. Typically, a protein, peptide, or polypeptide will be at least three amino acids long. A protein, peptide, or polypeptide may refer to an individual protein or a collection of proteins. One or more of the amino acids in a protein, peptide, or polypeptide may be modified, for example, by the addition of a chemical entity such as a carbohydrate group, a hydroxyl group, a phosphate group, a farnesyl group, an isofarnesyl group, a fatty acid group, a linker for conjugation, functionalization, or other modification, etc. A protein, peptide, or polypeptide may also be a single molecule or may be a multi-molecular complex. A protein, peptide, or polypeptide may be just a fragment of a naturally occurring protein or peptide. A protein, peptide, or polypeptide may be naturally occurring, recombinant, or synthetic, or any combination thereof. The term “fusion protein” as used herein refers to a hybrid polypeptide which comprises protein domains from at least two different proteins. One protein may be located at the amino-terminal (N-terminal) portion of the fusion protein or at the carboxy-terminal (C-terminal) protein thus forming an “amino-terminal fusion protein” or a “carboxy-terminal fusion protein,” respectively. A protein may comprise different domains, for example, a nucleic acid binding domain (e.g., the gRNA binding domain of Cas9 that directs the binding of the protein to a target site) and a nucleic acid cleavage domain or a catalytic domain of a recombinase. In some embodiments, a protein comprises a proteinaceous part, e.g., an amino acid sequence constituting a nucleic acid binding domain, and an organic compound, e.g., a compound that can act as a nucleic acid cleavage agent. In some embodiments, a protein is in a complex with, or is in association with, a nucleic acid, e.g., RNA. Any of the proteins provided herein may be produced by any method known in the art. For example, the proteins provided herein may be produced via recombinant protein expression and purification, which is especially suited for fusion proteins comprising a peptide linker. Methods for recombinant protein expression and purification are well known, and include those described by Green and Sambrook, Molecular Cloning: A Laboratory Manual (4th ed., Cold Spring Harbor Laboratory Press, Cold Spring Harbor, N.Y. (2012)), the entire contents of which are incorporated herein by reference. It should be appreciated that the disclosure provides any of the polypeptide sequences provided herein without an N-terminal methionine (M) residue.

[0040] The term “recombinant” as used herein in the context of proteins or nucleic acids refers to proteins or nucleic acids that do not occur in nature, but are the product of human engineering. For example, in some embodiments, a recombinant protein or nucleic acid molecule comprises an amino acid or nucleotide sequence that comprises at least one, at least two, at least three, at least four, at least five, at least six, or at least seven mutations as compared to any naturally occurring sequence.

[0041] The term “RNA-programmable nuclease,” and “RNA-guided nuclease” are used interchangeably herein and refer to a nuclease that forms a complex with (e.g., binds or associates with) one or more RNA that is not a target for cleavage (e.g., a Cas9 or homolog or variant thereof). In some embodiments, an RNA-programmable nuclease, when in a complex with an RNA, may be referred to as a nuclease:RNA complex. Typically, the bound RNA(s) is referred to as a guide RNA (gRNA). gRNAs can exist as a complex of two or more RNAs, or as a single RNA molecule. gRNAs that exist as a single RNA molecule may be referred to as single-guide RNAs (sgRNAs), though “gRNA” is used interchangeably to refer to guide RNAs that exist as either single molecules or as a complex of two or more molecules. Typically, gRNAs that exist as single RNA species comprise two domains: (1) a domain that shares homology to a target nucleic acid (e.g., and directs binding of a Cas9 (or equivalent) complex to the target); and (2) a domain that binds a Cas9 protein. In some embodiments, domain (2) corresponds to a sequence known as a tracrRNA, and comprises a stem-loop structure. For example, in some embodiments, domain (2) is homologous to a tracrRNA as depicted in FIG. 1E of Jinek et al., Science 337:816-821(2012), the entire contents of which is incorporated herein by reference. Other examples of gRNAs (e.g., those including domain 2) can be found in U.S. Provisional patent application, U.S. Ser. No. 61/874,682, filed Sep. 6, 2013, entitled “Switchable Cas9 Nucleases And Uses Thereof,” and U.S. Provisional patent application, U.S. Ser. No. 61/874,746, filed Sep. 6, 2013, entitled “Delivery System For Functional Nucleases,” the entire contents of each are hereby incorporated by reference in their entirety. In some embodiments, a gRNA comprises two or more of domains (1) and (2), and may be referred to as an “extended gRNA.” For example, an extended gRNA will, e.g., bind two or more Cas9 proteins and bind a target nucleic acid at two or more distinct regions, as described herein. The gRNA comprises a nucleotide sequence that complements a target site, which mediates binding of the nuclease/RNA complex to said target site, providing the sequence specificity of the nuclease:RNA complex. In some embodiments, the RNA-programmable nuclease is the (CRISPR-associated system) Cas9 endonuclease, for example Cas9 (Csn1) from Streptococcus pyogenes (see, e.g., “Complete genome sequence of an M1 strain of Streptococcus pyogenes.” Ferretti J. J., McShan W. M., Ajdic D. J., Savic D. J., Savic G., Lyon K., Primeaux C., Sezate S., Suvorov A. N., Kenton S., Lai H. S., Lin S. P., Qian Y., Jia H. G., Najar F. Z., Ren Q., Zhu H., Song L., White J., Yuan X., Clifton S. W., Roe B. A., McLaughlin R. E., Proc. Natl. Acad. Sci. U.S.A. 98:4658-4663(2001); “CRISPR RNA maturation by trans-encoded small RNA and host factor RNase III.” Deltcheva E., Chylinski K., Sharma C. M., Gonzales K., Chao Y., Pirzada Z. A., Eckert M. R., Vogel J., Charpentier E., Nature 471:602-607(2011); and “A programmable dual-RNA-guided DNA endonuclease in adaptive bacterial immunity.” Jinek M., Chylinski K., Fonfara I., Hauer M., Doudna J. A., Charpentier E. Science 337:816-821(2012), the entire contents of each of which are incorporated herein by reference.

[0042] Because RNA-programmable nucleases (e.g., Cas9) use RNA:DNA hybridization to target DNA cleavage sites, these proteins are able to be targeted, in principle, to any sequence specified by the guide RNA. Methods of using RNA-programmable nucleases, such as Cas9, for site-specific cleavage (e.g., to modify a genome) are known in the art (see e.g., Cong, L. et al. Multiplex genome engineering using CRISPR/Cas systems. Science 339, 819-823 (2013); Mali, P. et al. RNA-guided human genome engineering via Cas9. Science 339, 823-826 (2013); Hwang, W. Y. et al. Efficient genome editing in zebrafish using a CRISPR-Cas system. Nature biotechnology 31, 227-229 (2013); Jinek, M. et al. RNA-programmed genome editing in human cells. eLife 2, e00471 (2013); Dicarlo, J. E. et al. Genome engineering in Saccharomyces cerevisiae using CRISPR-Cas systems. Nucleic acids research (2013); Jiang, W. et al. RNA-guided editing of bacterial genomes using CRISPR-Cas systems. Nature biotechnology 31, 233-239 (2013); the entire contents of each of which are incorporated herein by reference).

[0043] The term “subject,” as used herein, refers to an individual organism, for example, an individual mammal. In some embodiments, the subject is a human. In some embodiments, the subject is a non-human mammal. In some embodiments, the subject is a non-human primate. In some embodiments, the subject is a rodent. In some embodiments, the subject is a sheep, a goat, a cattle, a cat, or a dog. In some embodiments, the subject is a vertebrate, an amphibian, a reptile, a fish, an insect, a fly, or a nematode. In some embodiments, the subject is a research animal. In some embodiments, the subject is genetically engineered, e.g., a genetically engineered non-human subject. The subject may be of either sex and at any stage of development. In some embodiments, the subject is an unborn subject that is in utero. In some embodiments, the subject is a zygote. In some embodiments, the subject is a blastocyst. In some embodiments, the subject is an embryo. In some embodiments, the subject is a fetus. In some embodiments, the subject has a mutation in an LMNA gene as compared to a wild-type version. In some embodiments, the subject has a point mutation in position 1824 of the LMNA gene, which replaces a cytosine with thymine. In some embodiments, the subject expresses progerin. In some embodiments, the subject has or is at risk of having Hutchinson-Gilford progeria syndrome (HGPS).

[0044] The term “target site” refers to a sequence within a nucleic acid molecule that is deaminated by a deaminase or a fusion protein comprising a deaminase (e.g., a dCas9-deaminase fusion protein provided herein). In some embodiments, the target site includes a mutant thymine at position 1824 of an LMNA gene, which can be targeted and mutated to a cytosine to correct the mutant thymine.

[0045] The terms “treatment,” “treat,” and “treating,” refer to a clinical intervention aimed to reverse, alleviate, delay the onset of, or inhibit the progress of a disease or disorder, or one or more symptoms thereof, as described herein. As used herein, the terms “treatment,” “treat,” and “treating” refer to a clinical intervention aimed to reverse, alleviate, delay the onset of, or inhibit the progress of a disease or disorder, or one or more symptoms thereof, as described herein. In some embodiments, treatment may be administered after one or more symptoms have developed and/or after a disease has been diagnosed. In other embodiments, treatment may be administered in the absence of symptoms, e.g., to prevent or delay onset of a symptom or inhibit onset or progression of a disease. For example, treatment may be administered to a susceptible individual prior to the onset of symptoms (e.g., in light of a history of symptoms and/or in light of genetic or other susceptibility factors). Treatment may also be continued after symptoms have resolved, for example, to prevent or delay their recurrence.

[0046] As used herein the term “variant” should be taken to mean the exhibition of qualities that have a pattern that deviates from what occurs in nature, e.g., a variant Cas9 is a Cas9 comprising one or more changes in amino acid residues as compared to a wild type Cas9 amino acid sequence. As another example, a variant of an LMNA gene may have one or more mutations, e.g., as compared to a wild-type allele, that leads to alternative splice forms of an LMNA mRNA. For example, a variant of an LMNA gene may have a point mutation in position 1824 that replaces a cytosine with thymine. As another example, variants include single nucleotide polymorphisms that manifest in changes in mRNA, splicing, or protein amino acid sequence (e.g., Arg471Cys, Arg482Gln, Arg527Leu, Arg527Cys, and Ala529Val of lamin A).

[0047] As used herein the term “wild-type” is a term of the art understood by skilled persons and means the typical form of an organism, strain, gene or characteristic as it occurs in nature as distinguished from mutant or variant forms. An exemplary wild-type LMNA gene has the nucleic acid sequence listed under the NCBI Reference Sequence: NG_008692.2.

### DETAILED DESCRIPTION OF THE INVENTION

[0048] Some aspects of this disclosure relate to methods and compositions useful for treating Hutchinson-Gilford progeria syndrome (HGPS). In some embodiments, the disclosure provides guide sequences capable of directing base editors (e.g., adenosine base editors) to a mutant C1824T allele of an LMNA gene to treat HGPS. In some aspects the disclosure provides proteins that deaminate the nucleobase adenine, for example in an LMNA gene to treat Hutchinson-Gilford progeria syndrome (HGPS). This disclosure describes adenosine deaminase proteins that are capable of deaminating (i.e., removing an amine group) adenine of a deoxyadenosine residue in deoxyribonucleic acid (DNA). For example, the adenosine deaminases provided herein are capable of deaminating adenine of a deoxyadenosine residue of DNA. Other aspects of the disclosure provide fusion proteins that comprise an adenosine deaminase (e.g., an adenosine deaminase that deaminates deoxyadenosine in DNA as described herein) and a domain (e.g., a Cas9 or a Cpf1 protein) capable of binding to a specific nucleotide sequence. The deamination of an adenosine by an adenosine deaminase can lead to a point mutation, this process is referred to herein as nucleic acid editing. For example, the adenosine may be converted to an inosine residue, which typically base pairs with a cytosine residue. Such fusion proteins are useful inter alia for targeted editing of nucleic acid sequences. Such fusion proteins may be used for targeted editing of DNA in vitro, e.g., for the generation of mutant cells or animals; for the introduction of targeted mutations, e.g., for the correction of genetic defects in cells ex vivo, e.g., in cells obtained from a subject that are subsequently re-introduced into the same or another subject; and for the introduction of targeted mutations in vivo, e.g., the correction of genetic defects or the introduction of deactivating mutations in disease-associated genes in a subject. As an example, diseases that can be treated by making an A to G, or a T to C mutation, may be treated using the nucleobase editors provided herein. The adenosine base editors described herein may be utilized for the targeted editing of such G to A mutations (e.g., targeted genome editing), for example a C1824T mutation in LMNA. The invention provides deaminases, fusion proteins, nucleic acids, vectors, cells, compositions, methods, kits, systems, etc. that utilize the deaminases and nucleobase editors.

[0049] In some embodiments, the nucleobase editors provided herein can be made by fusing together one or more protein domains, thereby generating a fusion protein. In certain embodiments, the fusion proteins provided herein comprise one or more features that improve the base editing activity (e.g., efficiency, selectivity, and specificity) of the fusion proteins. For example, the fusion proteins provided herein may comprise a Cas9 domain that has reduced nuclease activity. In some embodiments, the fusion proteins provided herein may have a Cas9 domain that does not have nuclease activity (dCas9), or a Cas9 domain that cuts one strand of a duplexed DNA molecule, referred to as a Cas9 nickase (nCas9). Without wishing to be bound by any particular theory, the presence of the catalytic residue (e.g., H840) maintains the activity of the Cas9 to cleave the non-edited (e.g., non-deaminated) strand containing a T opposite the targeted A. Mutation of the catalytic residue (e.g., D10 to A10) of Cas9 prevents cleavage of the edited strand containing the targeted A residue. Such Cas9 variants are able to generate a single-strand DNA break (nick) at a specific location based on the gRNA-defined target sequence, leading to repair of the non-edited strand, ultimately resulting in a T to C change on the non-edited strand.

### I. Base Editors

[0050] In various aspects, the instant specification provides base editors and methods of using the same to treat Hutchinson-Gilford progeria syndrome (HGPS). In particular, the inventors surprisingly found that adenosine base editors could be used to efficiently correct a C1824T point mutation in the LMNA gene both in vitro and in vivo, which is useful for the treatment of HGPS.

[0051] In certain aspects, methods provided herein utilize base editors (e.g., adenosine base editors) known in the art in order to make one or more desired nucleic acid modifications. The state of the art has described numerous base editors as of this filing. The methods and approaches herein described may be applied to any previously known base editor, or to base editors that may be developed in the future. Exemplary base editors that may be used in accordance with the present disclosure include those described in the following references and/or patent publications, each of which are incorporated by reference in their entireties: (a) PCT/US2014/070038 (published as WO2015/089406, Jun. 18, 2015) and its equivalents in the US or around the world; (b) PCT/US2016/058344 (published as WO2017/070632, Apr. 27, 2017) and its equivalents in the US or around the world; (c) PCT/US2016/058345 (published as WO2017/070633, Apr. 27, 2017) and its equivalent in the US or around the world; (d) PCT/US2017/045381 (published as WO2018/027078, Feb. 8, 2018) and its equivalents in the US or around the world; (e) PCT/US2017/056671 (published as WO2018/071868, Apr. 19, 2018) and its equivalents in the US or around the world; PCT/2017/048390 (WO2017/048390, Mar. 23, 2017) and its equivalents in the US or around the world; (f) PCT/US2017/068114 (not published) and its equivalents in the US or around the world; (g) PCT/US2017/068105 (not published) and its equivalents in the US or around the world; (h) PCT/US2017/046144 (WO2018/031683, Feb. 15, 2018) and its equivalents in the US or around the world; (i) PCT/US2018/024208 (not published) and its equivalents in the US or around the world; (j) PCT/2018/021878 (WO2018/021878, Feb. 1, 2018) and its equivalents in the US and around the world; (k) Komor, A. C., Kim, Y. B., Packer, M. S., Zuris, J. A. & Liu, D. R. Programmable editing of a target base in genomic DNA without double-stranded DNA cleavage. Nature 533, 420-(2016); (1) Gaudelli, N. M. et al. Programmable base editing of A.T to G.C in genomic DNA without DNA cleavage. Nature 551, 464-(2017); (m) any of the references listed in this specification entitled “References” and which reports or describes a base editor known in the art.

[0052] In various aspects, the improved or modified base editors described herein have the following generalized structure:
[0053] A-B-C,
[0054] wherein “A” is a Cas moiety or napDNA/RNAbp, “B” is nucleic acid effector domain (e.g., an adenosine deaminase), and “C” is one or more nuclear localization signals (NLS). In addition, the “-” represents a linker that covalently joins moieties A, B, and C. The linkers can be any suitable type (e.g., amino acid sequences or other biopolymers, or synthetic chemical linkages in the case where the moieties are bioconjugated to one another) or length. In addition, a functional base editor of the invention would also include one or more “R” or guide sequences (e.g., guide RNA in the case of a Cas9 or Cas9 equivalent) in order to carry out the DNA/RNA-programmable functionality of base editors for targeting specific sites to be corrected.

[0055] The order of linkage of the moieties is not meant to be particularly limiting so long as the particular arrangement of the elements of moieties produces a functional base editor. That is, the improved base editors of the invention may also include editors represented by the following structures:
[0056] B-A-C;
[0057] B-C-A;
[0058] C-B-A;
[0059] C-A-B; and
[0060] A-C-B.

[0061] In some embodiments, the base editors provided herein can be made as a recombinant fusion protein comprising one or more protein domains, thereby generating a base editor. In certain embodiments, the base editors provided herein comprise one or more features that improve the base editing activity (e.g., efficiency, selectivity, and/or specificity) of the base editor proteins. For example, the base editor proteins provided herein may comprise a Cas9 domain that has reduced nuclease activity. In some embodiments, the base editor proteins provided herein may have a Cas9 domain that does not have nuclease activity (dCas9), or a Cas9 domain that cuts one strand of a duplexed DNA molecule, referred to as a Cas9 nickase (nCas9). Without wishing to be bound by any particular theory, the presence of the catalytic residue (e.g., H840) maintains the activity of the Cas9 to cleave the non-edited (e.g., non-deaminated) strand containing a T opposite the targeted A. Mutation of the catalytic residue (e.g., D10 to A10) of Cas9 prevents cleavage of the edited strand containing the targeted A residue. Such Cas9 variants are able to generate a single-strand DNA break (nick) at a specific location based on the gRNA-defined target sequence, leading to repair of the non-edited strand, ultimately resulting in a T to C change on the non-edited strand.

[0062] In particular, the disclosure provides adenosine base editors that can be used to correct a C1824T point mutation in an LMNA gene to treat HGPS. Such adenosine base editors have been described previously, for example, in. Exemplary domains used in base editing fusion proteins, including adenosine deaminases, napDNA/RNAbp (e.g., Cas9), and nuclear localization sequences (NLSs) are described in further detail below.

### Adenosine Deaminases

[0063] Some aspects of the disclosure provide adenosine deaminases, which are used as effector domains of base editors described herein. In some embodiments, the adenosine deaminases provided herein are capable of deaminating adenine. In some embodiments, the adenosine deaminases provided herein are capable of deaminating adenine in a deoxyadenosine residue of DNA. The adenosine deaminase may be derived from any suitable organism (e.g., E. coli). In some embodiments, the adenine deaminase is a naturally-occurring adenosine deaminase that includes one or more mutations corresponding to any of the mutations provided herein (e.g., mutations in ecTadA). One of skill in the art will be able to identify the corresponding residue in any homologous protein and in the respective encoding nucleic acid by methods well known in the art, e.g., by sequence alignment and determination of homologous residues. Accordingly, one of skill in the art would be able to generate mutations in any naturally-occurring adenosine deaminase (e.g., having homology to ecTadA) that corresponds to any of the mutations described herein, e.g., any of the mutations identified in ecTadA. In some embodiments, the adenosine deaminase is from a prokaryote. In some embodiments, the adenosine deaminase is from a bacterium. In some embodiments, the adenosine deaminase is from Escherichia coli, Staphylococcus aureus, Salmonella typhi, Shewanella putrefaciens, Haemophilus influenzae, Caulobacter crescentus, or Bacillus subtilis. In some embodiments, the adenosine deaminase is from E. coli.

[0064] In some embodiments, the adenosine deaminase is at least 50%, at least 55%, at least 60%, at least 65%, at least 70%, at least 75% at least 80%, at least 85%, at least 90%, at least 95%, at least 96%, at least 97%, at least 98%, at least 99%, or at least 99.5% identical to a naturally-occurring adenosine deaminase. In some embodiments, the adenosine deaminase is from a bacterium, such as, E. coli, S. aureus, S. typhi, S. putrefaciens, H. influenzae, or C. crescentus. In some embodiments, the adenosine deaminase is a TadA deaminase. In some embodiments, the TadA deaminase is an E. coli TadA deaminase (ecTadA). In some embodiments, the TadA deaminase is a truncated E. coli TadA deaminase. For example, the truncated ecTadA may be missing one or more N-terminal amino acids relative to a full-length ecTadA. In some embodiments, the truncated ecTadA may be missing 1, 2, 3, 4, 5, 6, 7, 8, 9, 10, 11, 12, 13, 14, 15, 6, 17, 18, 19, or 20 N-terminal amino acid residues relative to the full length ecTadA. In some embodiments, the truncated ecTadA may be missing 1, 2, 3, 4, 5, 6, 7, 8, 9, 10, 11, 12, 13, 14, 15, 6, 17, 18, 19, or 20 C-terminal amino acid residues relative to the full length ecTadA. In some embodiments, the ecTadA deaminase does not comprise an N-terminal methionine

[0065] In some embodiments, the TadA deaminase is an N-terminal truncated TadA. In certain embodiments, the adenosine deaminase comprises the amino acid sequence:

(SEQ ID NO: 1)
MSEVEFSHEYWMRHALTLAKRAWDEREVPVGAVLVHNNRVIGEGWNRPIG
RHDPTAHAEIMALRQGGLVMQNYRLIDATLYVTLEPCVMCAGAMIHSRIG
RVVFGARDAKTGAAGSLMDVLHHPGMNHRVEITEGILADECAALLSDFFR
MRRQEIKAQKKAQSSTD.

[0066] In some embodiments the TadA deaminase is a full-length E. coli TadA deaminase. For example, in certain embodiments, the adenosine deaminase comprises the amino acid sequence:

(SEQ ID NO: 2)
MRRAFITGVFFLSEVEFSHEYWMRHALTLAKRAWDEREVPVGAVLVHNNR
VIGEGWNRPIGRHDPTAHAEIMALRQGGLVMQNYRLIDATLYVTLEPCVM
CAGAMIHSRIGRVVFGARDAKTGAAGSLMDVLHHPGMNHRVEITEGILAD
ECAALLSDFFRMRRQEIKAQKKAQSSTD

[0067] It should be appreciated, however, that additional adenosine deaminases useful in the present application would be apparent to the skilled artisan and are within the scope of this disclosure. For example, the adenosine deaminase may be a homolog of an ADAT. Exemplary ADAT homologs include, without limitation:

Staphylococcus aureus TadA:

(SEQ ID NO: 3)
MGSHMTNDIYFMTLAIEEAKKAAQLGEVPIGAIITKDDEVIARAHNLRET
LQQPTAHAEHIAIERAAKVLGSWRLEGCTLYVTLEPCVMCAGTIVMSRIP
RVVYGADDPKGGCSGSLMNLLQQSNFNHRAIVDKGVLKEACSTLLTTFFK
NLRANKKSTN

Bacillus subtilis TadA:

(SEQ ID NO: 4)
MTQDELYMKEAIKEAKKAEEKGEVPIGAVLVINGEIIARAHNLRETEQR
SIAHAEMLVIDEACKALGTWRLEGATLYVTLEPCPMCAGAVVLSRVEKV
VFGAFDPKGGCSGTLMNLLQEERFNHQAEVVSGVLEEECGGMLSAFFRE
LRKKKKAARKNLSE

Salmonella typhimurium (S. typhimurium) TadA:

(SEQ ID NO: 5)
MPPAFITGVTSLSDVELDHEYWMRHALTLAKRAWDEREVPVGAVLVHNH
RVIGEGWNRPIGRHDPTAHAEIMALRQGGLVLQNYRLLDTTLYVTLEPC
VMCAGAMVHSRIGRVVFGARDAKTGAAGSLIDVLHHPGMNHRVEIIEGV
LRDECATLLSDFFRMRRQEIKALKKADRAEGAGPAV

[0068] Shewanella putrefaciens (S. putrefaciens) TadA:

(SEQ ID NO: 6)
MDEYWMQVAMQMAEKAEAAGEVPVGAVLVKDGQQIATGYNLSISQHDPT
AHAEILCLRSAGKKLENYRLLDATLYITLEPCAMCAGAMVHSRIARVVY
GARDEKTGAAGTVVNLLQHPAFNHQVEVTSGVLAEACSAQLSRFFKRRR
DEKKALKLAQRAQQGIE

Haemophilus influenzae F3031 (H. influenzae) TadA:

(SEQ ID NO: 7)
MDAAKVRSEFDEKMMRYALELADKAEALGEIPVGAVLVDDARNIIGEGW
NLSIVQSDPTAHAEIIALRNGAKNIQNYRLLNSTLYVTLEPCTMCAGAI
LHSRIKRLVFGASDYKTGAIGSRFHFFDDYKMNHTLEITSGVLAEECSQ
KLSTFFQKRREEKKIEKALLKSLSDK

Caulobacter crescentus (C. crescentus) TadA:

(SEQ ID NO: 8)
MRTDESEDQDHRMMRLALDAARAAAEAGETPVGAVILDPSTGEVIATAG
NGPIAAHDPTAHAEIAAMRAAAAKLGNYRLTDLTLVVTLEPCAMCAGAI
SHARIGRVVFGADDPKGGAVVHGPKFFAQPTCHWRPEVTGGVLADESAD
LLRGFFRARRKAKI

Geobacter sulfurreducens (G. sulfurreducens) TadA:

(SEQ ID NO: 9)
MSSLKKTPIRDDAYWMGKAIREAAKAAARDEVPIGAVIVRDGAVIGRGH
NLREGSNDPSAHAEMIAIRQAARRSANWRLTGATLYVTLEPCLMCMGAI
ILARLERVVFGCYDPKGGAAGSLYDLSADPRLNHQVRLSPGVCQEECGT
MLSDFFRDLRRRKKAKATPALFIDERKVPPEP

### TadA 7.10:

(SEQ ID NO: 10)
SEVEFSHEYWMRHALTLAKRARDEREVPVGAVLVLNNRVIGEGWNRAIG
LHDPTAHAEIMALRQGGLVMQNYRLIDATLYVTFEPCVMCAGAMIHSRI
GRVVFGVRNAKTGAAGSLMDVLHYPGMNHRVEITEGILADECAALLCYF
FRMPRQVFNAQKKAQSSTD

[0070] In some embodiments, the TadA 7.10 of SEQ ID NO: 10 comprises an N-terminal methionine. It should be appreciated that the amino acid numbering scheme relating to the mutations in TadA 7.10 may be based on the TadA sequence of SEQ ID NO: 1, which contains an N-terminal methionine.

[0071] In some embodiments, the adenosine deaminase comprises an amino acid sequence that is at least 60%, at least 65%, at least 70%, at least 75%, at least 80%, at least 85%, at least 90%, at least 95%, at least 96%, at least 97%, at least 98%, at least 99%, or at least 99.5% identical to any one of the amino acid sequences set forth in any one of SEQ ID NOs: 1-10, or to any of the adenosine deaminases provided herein. It should be appreciated that adenosine deaminases provided herein may include one or more mutations (e.g., any of the mutations provided herein). The disclosure provides any deaminase domains with a certain percent identity plus any of the mutations or combinations thereof described herein. In some embodiments, the adenosine deaminase comprises an amino acid sequence that has 1, 2, 3, 4, 5, 6, 7, 8, 9, 10, 11, 12, 13, 14, 15, 16, 17, 18, 19, 20, 21, 22, 21, 24, 25, 26, 27, 28, 29, 30, 31, 32, 33, 34, 35, 36, 37, 38, 39, 40, 41, 42, 43, 44, 45, 46, 47, 48, 49, 50, or more mutations compared to any one of the amino acid sequences set forth in SEQ ID NOs: 1-10, or any of the adenosine deaminases provided herein. In some embodiments, the adenosine deaminase comprises an amino acid sequence that has at least 5, at least 10, at least 15, at least 20, at least 25, at least 30, at least 35, at least 40, at least 45, at least 50, at least 60, at least 70, at least 80, at least 90, at least 100, at least 110, at least 120, at least 130, at least 140, at least 150, at least 160, or at least 170 identical contiguous amino acid residues as compared to any one of the amino acid sequences set forth in SEQ ID NOs: 1-10, or any of the adenosine deaminases provided herein.

[0072] In some embodiments, the adenosine deaminase comprises a D108X mutation in ecTadA SEQ ID NO: 1, or a corresponding mutation in another adenosine deaminase (e.g., SEQ ID NO: 2-10), where X indicates any amino acid other than the corresponding amino acid in the wild-type adenosine deaminase. In some embodiments, the adenosine deaminase comprises a D108G, D108N, D108V, D108A, or D108Y mutation in SEQ ID NO: 1, or a corresponding mutation in another adenosine deaminase (e.g., SEQ ID NO: 2-10). In some embodiments, the adenosine deaminase comprises a D108N mutation in SEQ ID NO: 1, or a corresponding mutation in another adenosine deaminase (e.g., SEQ ID NO: 2-10). It should be appreciated, however, that additional deaminases may similarly be aligned to identify homologous amino acid residues that can be mutated as provided herein.

[0073] In some embodiments, the adenosine deaminse comprises an A106X mutation in ecTadA SEQ ID NO: 1, or a corresponding mutation in another adenosine deaminase (e.g., SEQ ID NO: 2-10), where X indicates any amino acid other than the corresponding amino acid in the wild-type adenosine deaminase. In some embodiments, the adenosine deaminase comprises an A106V mutation in SEQ ID NO: 1, or a corresponding mutation in another adenosine deaminase (e.g., SEQ ID NO: 2-10).

[0074] In some embodiments, the adenosine deaminase comprises a E155X mutation in SEQ ID NO: 1, or a corresponding mutation in another adenosine deaminase (e.g., SEQ ID NO: 2-10), where the presence of X indicates any amino acid other than the corresponding amino acid in the wild-type adenosine deaminase. In some embodiments, the adenosine deaminase comprises a E155D, E155G, or E155V mutation in SEQ ID NO: 1, or a corresponding mutation in another adenosine deaminase (e.g., SEQ ID NO: 2-10). In some embodiments, the adenosine deaminase comprises a E155V mutation in SEQ ID NO: 1, or a corresponding mutation in another adenosine deaminase (e.g., SEQ ID NO: 2-10).

[0075] In some embodiments, the adenosine deaminase comprises a D147X mutation in SEQ ID NO: 1, or a corresponding mutation in another adenosine deaminase (e.g., SEQ ID NO: 2-10), where the presence of X indicates any amino acid other than the corresponding amino acid in the wild-type adenosine deaminase. In some embodiments, the adenosine deaminase comprises a D147Y mutation in SEQ ID NO: 1, or a corresponding mutation in another adenosine deaminase (e.g., SEQ ID NO: 2-10).

[0076] It should be appreciated that any of the mutations provided herein (e.g., based on the ecTadA amino acid sequence of SEQ ID NO: 1) may be introduced into other adenosine deaminases, such as S. aureus TadA (saTadA), or other adenosine deaminases (e.g., bacterial adenosine deaminases). It would be apparent to the skilled artisan how to identify amino acid residues from other adenosine deaminases that are homologous to the mutated residues in ecTadA. Thus, any of the mutations identified in ecTadA may be made in other adenosine deaminases that have homologous amino acid residues. It should also be appreciated that any of the mutations provided herein may be made individually or in any combination in ecTadA or another adenosine deaminase (e.g., SEQ ID NO: 2-10). For example, an adenosine deaminase may contain a D108N, a A106V, a E155V, and/or a D147Y mutation in ecTadA SEQ ID NO: 1, or a corresponding mutation in another adenosine deaminase (e.g., SEQ ID NO: 2-10). In some embodiments, an adenosine deaminase comprises the following group of mutations (groups of mutations are separated by a “;”) in ecTadA SEQ ID NO: 1, or corresponding mutations in another adenosine deaminase (e.g., SEQ ID NO: 2-10): D108N and A106V; D108N and E155V; D108N and D147Y; A106V and E155V; A106V and D147Y; E155V and D147Y; D108N, A106V, and E55V; D108N, A106V, and D147Y; D108N, E55V, and D147Y; A106V, E55V, and D147Y; and D108N, A106V, E55V, and D147Y. It should be appreciated, however, that any combination of corresponding mutations provided herein may be made in an adenosine deaminase (e.g., ecTadA). In some embodiments, an adenosine deaminase comprises one or more of the mutations provided herein, which identifies individual mutations and combinations of mutations made in ecTadA. In some embodiments, an adenosine deaminase comprises any mutation or combination of mutations provided herein.

[0077] In some embodiments, the adenosine deaminse comprises an L84X mutation in ecTadA SEQ ID NO: 1, or a corresponding mutation in another adenosine deaminase (e.g., SEQ ID NO: 2-10), where X indicates any amino acid other than the corresponding amino acid in the wild-type adenosine deaminase. In some embodiments, the adenosine deaminase comprises an L84F mutation in SEQ ID NO: 1, or a corresponding mutation in another adenosine deaminase (e.g., SEQ ID NO: 2-10).

[0078] In some embodiments, the adenosine deaminse comprises an H123X mutation in ecTadA SEQ ID NO: 1, or a corresponding mutation in another adenosine deaminase (e.g., SEQ ID NO: 2-10), where X indicates any amino acid other than the corresponding amino acid in the wild-type adenosine deaminase. In some embodiments, the adenosine deaminase comprises an H123Y mutation in SEQ ID NO: 1, or a corresponding mutation in another adenosine deaminase (e.g., SEQ ID NO: 2-10).

[0079] In some embodiments, the adenosine deaminse comprises an I156X mutation in ecTadA SEQ ID NO: 1, or a corresponding mutation in another adenosine deaminase (e.g., SEQ ID NO: 2-10), where X indicates any amino acid other than the corresponding amino acid in the wild-type adenosine deaminase. In some embodiments, the adenosine deaminase comprises an I156F mutation in SEQ ID NO: 1, or a corresponding mutation in another adenosine deaminase (e.g., SEQ ID NO: 2-10).

[0080] In some embodiments, the adenosine deaminase comprises one, two, three, four, five, six, or seven mutations selected from the group consisting of L84X, A106X, D108X, H123X, D147X, E155X, and I156X in SEQ ID NO: 1, or a corresponding mutation or mutations in another adenosine deaminase (e.g., SEQ ID NO: 2-10), where X indicates the presence of any amino acid other than the corresponding amino acid in the wild-type adenosine deaminase.

[0081] In some embodiments, the adenosine deaminase comprises one, two, three, four, five, six, or seven mutations selected from the group consisting of L84F, A106V, D108N, H123Y, D147Y, E155V, and I156F in SEQ ID NO: 1, or a corresponding mutation or mutations in another adenosine deaminase (e.g., SEQ ID NO: 2-10). In some embodiments, the adenosine deaminase comprises one, two, three, four, five, or six mutations selected from the group consisting of S2A, I49F, A106V, D108N, D147Y, and E155V in SEQ ID NO: 1, or a corresponding mutation or mutations in another adenosine deaminase (e.g., SEQ ID NO: 2-10). In some embodiments, the adenosine deaminase comprises one, two, three, four, or five, mutations selected from the group consisting of H8Y, A106T, D108N, N127S, and K160S in SEQ ID NO: 1, or a corresponding mutation or mutations in another adenosine deaminase (e.g., SEQ ID NO: 2-10).

[0082] In some embodiments, the adenosine deaminse comprises an A142X mutation in ecTadA SEQ ID NO: 1, or a corresponding mutation in another adenosine deaminase (e.g., SEQ ID NO: 2-10), where X indicates any amino acid other than the corresponding amino acid in the wild-type adenosine deaminase. In some embodiments, the adenosine deaminase comprises an A142N, A142D, A142G, mutation in SEQ ID NO: 1, or a corresponding mutation in another adenosine deaminase (e.g., SEQ ID NO: 2-10). In some embodiments, the adenosine deaminase comprises an A142N mutation in SEQ ID NO: 1, or a corresponding mutation in another adenosine deaminase (e.g., SEQ ID NO: 2-10).

[0083] In some embodiments, the adenosine deaminse comprises an H36X mutation in ecTadA SEQ ID NO: 1, or a corresponding mutation in another adenosine deaminase (e.g., SEQ ID NO: 2-10), where X indicates any amino acid other than the corresponding amino acid in the wild-type adenosine deaminase. In some embodiments, the adenosine deaminase comprises an H36L mutation in SEQ ID NO: 1, or a corresponding mutation in another adenosine deaminase (e.g., SEQ ID NO: 2-10).

[0084] In some embodiments, the adenosine deaminse comprises an N37X mutation in ecTadA SEQ ID NO: 1, or a corresponding mutation in another adenosine deaminase (e.g., SEQ ID NO: 2-10), where X indicates any amino acid other than the corresponding amino acid in the wild-type adenosine deaminase. In some embodiments, the adenosine deaminase comprises an N37T, or N37S mutation in SEQ ID NO: 1, or a corresponding mutation in another adenosine deaminase (e.g., SEQ ID NO: 2-10). In some embodiments, the adenosine deaminase comprises a N37S mutation in SEQ ID NO: 1, or a corresponding mutation in another adenosine deaminase (e.g., SEQ ID NO: 2-10).

[0085] In some embodiments, the adenosine deaminse comprises an P48X mutation in ecTadA SEQ ID NO: 1, or a corresponding mutation in another adenosine deaminase (e.g., SEQ ID NO: 2-10), where X indicates any amino acid other than the corresponding amino acid in the wild-type adenosine deaminase. In some embodiments, the adenosine deaminase comprises an P48T, P48S, P48A, or P48L mutation in SEQ ID NO: 1, or a corresponding mutation in another adenosine deaminase (e.g., SEQ ID NO: 2-10). In some embodiments, the adenosine deaminase comprises a P48T mutation in SEQ ID NO: 1, or a corresponding mutation in another adenosine deaminase (e.g., SEQ ID NO: 2-10). In some embodiments, the adenosine deaminase comprises a P48S mutation in SEQ ID NO: 1, or a corresponding mutation in another adenosine deaminase (e.g., SEQ ID NO: 2-10). In some embodiments, the adenosine deaminase comprises a P48A mutation in SEQ ID NO: 1, or a corresponding mutation in another adenosine deaminase (e.g., SEQ ID NO: 2-10).

[0086] In some embodiments, the adenosine deaminse comprises an R51X mutation in ecTadA SEQ ID NO: 1, or a corresponding mutation in another adenosine deaminase (e.g., SEQ ID NO: 2-10), where X indicates any amino acid other than the corresponding amino acid in the wild-type adenosine deaminase. In some embodiments, the adenosine deaminase comprises an R51H, or R51L mutation in SEQ ID NO: 1, or a corresponding mutation in another adenosine deaminase (e.g., SEQ ID NO: 2-10). In some embodiments, the adenosine deaminase comprises a R51L mutation in SEQ ID NO: 1, or a corresponding mutation in another adenosine deaminase (e.g., SEQ ID NO: 2-10).

[0087] In some embodiments, the adenosine deaminse comprises an S146X mutation in ecTadA SEQ ID NO: 1, or a corresponding mutation in another adenosine deaminase (e.g., SEQ ID NO: 2-10), where X indicates any amino acid other than the corresponding amino acid in the wild-type adenosine deaminase. In some embodiments, the adenosine deaminase comprises an S146R, or S146C mutation in SEQ ID NO: 1, or a corresponding mutation in another adenosine deaminase (e.g., SEQ ID NO: 2-10). In some embodiments, the adenosine deaminase comprises a S146C mutation in SEQ ID NO: 1, or a corresponding mutation in another adenosine deaminase (e.g., SEQ ID NO: 2-10).

[0088] In some embodiments, the adenosine deaminse comprises an K157X mutation in ecTadA SEQ ID NO: 1, or a corresponding mutation in another adenosine deaminase (e.g., SEQ ID NO: 2-10), where X indicates any amino acid other than the corresponding amino acid in the wild-type adenosine deaminase. In some embodiments, the adenosine deaminase comprises a K157N mutation in SEQ ID NO: 1, or a corresponding mutation in another adenosine deaminase (e.g., SEQ ID NO: 2-10).

[0089] In some embodiments, the adenosine deaminse comprises an W23X mutation in ecTadA SEQ ID NO: 1, or a corresponding mutation in another adenosine deaminase (e.g., SEQ ID NO: 2-10), where X indicates any amino acid other than the corresponding amino acid in the wild-type adenosine deaminase. In some embodiments, the adenosine deaminase comprises a W23R, or W23L mutation in SEQ ID NO: 1, or a corresponding mutation in another adenosine deaminase (e.g., SEQ ID NO: 2-10). In some embodiments, the adenosine deaminase comprises a W23R mutation in SEQ ID NO: 1, or a corresponding mutation in another adenosine deaminase (e.g., SEQ ID NO: 2-10). In some embodiments, the adenosine deaminase comprises a W23L mutation in SEQ ID NO: 1, or a corresponding mutation in another adenosine deaminase (e.g., SEQ ID NO: 2-10).

[0090] In some embodiments, the adenosine deaminse comprises an R152X mutation in ecTadA SEQ ID NO: 1, or a corresponding mutation in another adenosine deaminase (e.g., SEQ ID NO: 2-10), where X indicates any amino acid other than the corresponding amino acid in the wild-type adenosine deaminase. In some embodiments, the adenosine deaminase comprises a R152P, or R52H mutation in SEQ ID NO: 1, or a corresponding mutation in another adenosine deaminase (e.g., SEQ ID NO: 2-10). In some embodiments, the adenosine deaminase comprises a R152P mutation in SEQ ID NO: 1, or a corresponding mutation in another adenosine deaminase (e.g., SEQ ID NO: 2-10). In some embodiments, the adenosine deaminase comprises a R152H mutation in SEQ ID NO: 1, or a corresponding mutation in another adenosine deaminase (e.g., SEQ ID NO: 2-10).

[0091] In some embodiments, the adenosine deaminse comprises an R26X mutation in ecTadA SEQ ID NO: 1, or a corresponding mutation in another adenosine deaminase (e.g., SEQ ID NO: 2-10), where X indicates any amino acid other than the corresponding amino acid in the wild-type adenosine deaminase. In some embodiments, the adenosine deaminase comprises a R26G mutation in SEQ ID NO: 1, or a corresponding mutation in another adenosine deaminase (e.g., SEQ ID NO: 2-10).

[0092] In some embodiments, the adenosine deaminse comprises an I49X mutation in ecTadA SEQ ID NO: 1, or a corresponding mutation in another adenosine deaminase (e.g., SEQ ID NO: 2-10), where X indicates any amino acid other than the corresponding amino acid in the wild-type adenosine deaminase. In some embodiments, the adenosine deaminase comprises a I49V mutation in SEQ ID NO: 1, or a corresponding mutation in another adenosine deaminase (e.g., SEQ ID NO: 2-10).

[0093] In some embodiments, the adenosine deaminse comprises an N72X mutation in ecTadA SEQ ID NO: 1, or a corresponding mutation in another adenosine deaminase (e.g., SEQ ID NO: 2-10), where X indicates any amino acid other than the corresponding amino acid in the wild-type adenosine deaminase. In some embodiments, the adenosine deaminase comprises a N72D mutation in SEQ ID NO: 1, or a corresponding mutation in another adenosine deaminase (e.g., SEQ ID NO: 2-10).

[0094] In some embodiments, the adenosine deaminse comprises an S97X mutation in ecTadA SEQ ID NO: 1, or a corresponding mutation in another adenosine deaminase (e.g., SEQ ID NO: 2-10), where X indicates any amino acid other than the corresponding amino acid in the wild-type adenosine deaminase. In some embodiments, the adenosine deaminase comprises a S97C mutation in SEQ ID NO: 1, or a corresponding mutation in another adenosine deaminase (e.g., SEQ ID NO: 2-10).

[0095] In some embodiments, the adenosine deaminse comprises an G125X mutation in ecTadA SEQ ID NO: 1, or a corresponding mutation in another adenosine deaminase (e.g., SEQ ID NO: 2-10), where X indicates any amino acid other than the corresponding amino acid in the wild-type adenosine deaminase. In some embodiments, the adenosine deaminase comprises a G125A mutation in SEQ ID NO: 1, or a corresponding mutation in another adenosine deaminase (e.g., SEQ ID NO: 2-10).

[0096] In some embodiments, the adenosine deaminse comprises an K161X mutation in ecTadA SEQ ID NO: 1, or a corresponding mutation in another adenosine deaminase (e.g., SEQ ID NO: 2-10), where X indicates any amino acid other than the corresponding amino acid in the wild-type adenosine deaminase. In some embodiments, the adenosine deaminase comprises a K161T mutation in SEQ ID NO: 1, or a corresponding mutation in another adenosine deaminase (e.g., SEQ ID NO: 2-10).

[0097] In some embodiments, the adenosine deaminase comprises one or more of a W23X, H36X, N37X, P48X, I49X, R51X, N72X, L84X, S97X, A106X, D108X, H123X, G125X, A142X, S146X, D147X, R152X, E155X, I156X, K157X, and/or K161X mutation in SEQ ID NO: 1, or one or more corresponding mutations in another adenosine deaminase (e.g., SEQ ID NO: 2-10), where the presence of X indicates any amino acid other than the corresponding amino acid in the wild-type adenosine deaminase. In some embodiments, the adenosine deaminase comprises one or more of W23L, W23R, H36L, P48S, P48A, R51L, L84F, A106V, D108N, H123Y, A142N, S146C, D147Y, R152P, E155V, I156F, and/or K157N mutation in SEQ ID NO: 1, or one or more corresponding mutations in another adenosine deaminase (e.g., SEQ ID NO: 2-10). In some embodiments, the adenosine deaminase comprises one or more of the mutations provided herein corresponding to SEQ ID NO: 1, or one or more corresponding mutations in another adenosine deaminase (e.g., SEQ ID NO: 2-10).

[0098] In some embodiments, the adenosine deaminase comprises or consists of one or two mutations selected from A106X and D108X in SEQ ID NO: 1, or a corresponding mutation or mutations in another adenosine deaminase (e.g., SEQ ID NO: 2-10), where X indicates the presence of any amino acid other than the corresponding amino acid in the wild-type adenosine deaminase. In some embodiments, the adenosine deaminase comprises or consists of one or two mutations selected from A106V and D108N in SEQ ID NO: 1, or a corresponding mutation or mutations in another adenosine deaminase (e.g., SEQ ID NO: 2-10).

[0099] In some embodiments, the adenosine deaminase comprises or consists of one, two, three, or four mutations selected from A106X, D108X, D147X, and E155X in SEQ ID NO: 1, or a corresponding mutation or mutations in another adenosine deaminase (e.g., SEQ ID NO: 2-10), where X indicates the presence of any amino acid other than the corresponding amino acid in the wild-type adenosine deaminase. In some embodiments, the adenosine deaminase comprises or consists of one, two, three, or four mutations selected from A106V, D108N, D147Y, and E155V in SEQ ID NO: 1, or a corresponding mutation or mutations in another adenosine deaminase (e.g., SEQ ID NO: 2-10). In some embodiments, the adenosine deaminase comprises or consists of a A106V, D108N, D147Y, and E155V mutation in SEQ ID NO: 1, or corresponding mutations in another adenosine deaminase (e.g., SEQ ID NO: 2-10).

[0100] In some embodiments, the adenosine deaminase comprises or consists of one, two, three, four, five, six, or seven mutations selected from L84X, A106X, D108X, H123X, D147X, E155X, and I156X in SEQ ID NO: 1, or a corresponding mutation or mutations in another adenosine deaminase (e.g., SEQ ID NO: 2-10), where X indicates the presence of any amino acid other than the corresponding amino acid in the wild-type adenosine deaminase. In some embodiments, the adenosine deaminase comprises or consists of one, two, three, four, five, six, or seven mutations selected from L84F, A106V, D108N, H123Y, D147Y, E155V, and I156F in SEQ ID NO: 1, or a corresponding mutation or mutations in another adenosine deaminase (e.g., SEQ ID NO: 2-10). In some embodiments, the adenosine deaminase comprises or consists of a L84F, A106V, D108N, H123Y, D147Y, E155V, and I156F mutation in SEQ ID NO: 1, or corresponding mutations in another adenosine deaminase (e.g., SEQ ID NO: 2-10).

[0101] In some embodiments, the adenosine deaminase comprises or consists of one, two, three, four, five, six, seven, eight, nine, ten, or eleven mutations selected from H36X, R51X, L84X, A106X, D108X, H123X, S146X, D147X, E155X, I156X, and K157X in SEQ ID NO: 1, or a corresponding mutation or mutations in another adenosine deaminase (e.g., SEQ ID NO: 2-10), where X indicates the presence of any amino acid other than the corresponding amino acid in the wild-type adenosine deaminase. In some embodiments, the adenosine deaminase comprises or consists of one, two, three, four, five, six, seven, eight, nine, ten, or eleven mutations selected from H36L, R51L, L84F, A106V, D108N, H123Y, S146C, D147Y, E155V, I156F, and K157N in SEQ ID NO: 1, or a corresponding mutation or mutations in another adenosine deaminase (e.g., SEQ ID NO: 2-10). In some embodiments, the adenosine deaminase comprises or consists of a H36L, R51L, L84F, A106V, D108N, H123Y, S146C, D147Y, E155V, I156F, and K157N mutation in SEQ ID NO: 1, or corresponding mutations in another adenosine deaminase (e.g., SEQ ID NO: 2-10).

[0102] In some embodiments, the adenosine deaminase comprises or consists of one, two, three, four, five, six, seven, eight, nine, ten, eleven, or twelve mutations selected from H36X, P48X, R51X, L84X, A106X, D108X, H123X, S146X, D147X, E155X, I156X, and K157X in SEQ ID NO: 1, or a corresponding mutation or mutations in another adenosine deaminase (e.g., SEQ ID NO: 2-10), where X indicates the presence of any amino acid other than the corresponding amino acid in the wild-type adenosine deaminase. In some embodiments, the adenosine deaminase comprises or consists of one, two, three, four, five, six, seven, eight, nine, ten, eleven, or twelve mutations selected from H36L, P48S, R51L, L84F, A106V, D108N, H123Y, S146C, D147Y, E155V, I156F, and K157N in SEQ ID NO: 1, or a corresponding mutation or mutations in another adenosine deaminase (e.g., SEQ ID NO: 2-10). In some embodiments, the adenosine deaminse comprises or consists of a H36L, P48S, R51L, L84F, A106V, D108N, H123Y, S146C, D147Y, E155V, I156F, and K157N mutation in SEQ ID NO: 1, or corresponding mutations in another adenosine deaminase (e.g., SEQ ID NO: 2-10).

[0103] In some embodiments, the adenosine deaminase comprises or consists of one, two, three, four, five, six, seven, eight, nine, ten, eleven, twelve, or thirteen mutations selected from H36X, P48X, R51X, L84X, A106X, D108X, H123X, A142X, S146X, D147X, E155X, I156X, and K157X in SEQ ID NO: 1, or a corresponding mutation or mutations in another adenosine deaminase (e.g., SEQ ID NO: 2-10), where X indicates the presence of any amino acid other than the corresponding amino acid in the wild-type adenosine deaminase. In some embodiments, the adenosine deaminase comprises or consists of one, two, three, four, five, six, seven, eight, nine, ten, eleven, twelve, or thirteen mutations selected from H36L, P48S, R51L, L84F, A106V, D108N, H123Y, A142N, S146C, D147Y, E155V, I156F, and K157N in SEQ ID NO: 1, or a corresponding mutation or mutations in another adenosine deaminase (e.g., SEQ ID NO: 2-10). In some embodiments, the adenosine deaminase comprises or consists of a H36L, P48S, R51L, L84F, A106V, D108N, H123Y, A142N, S146C, D147Y, E155V, I156F, and K157N mutation in SEQ ID NO: 1, or corresponding mutations in another adenosine deaminase (e.g., SEQ ID NO: 2-10).

[0104] In some embodiments, the adenosine deaminase comprises or consists of one, two, three, four, five, six, seven, eight, nine, ten, eleven, twelve, thirteen, or fourteen mutations selected from W23X, H36X, P48X, R51X, L84X, A106X, D108X, H123X, A142X, S146X, D147X, E155X, I156X, and K157X in SEQ ID NO: 1, or a corresponding mutation or mutations in another adenosine deaminase (e.g., SEQ ID NO: 2-10), where X indicates the presence of any amino acid other than the corresponding amino acid in the wild-type adenosine deaminase. In some embodiments, the adenosine deaminase comprises or consists of one, two, three, four, five, six, seven, eight, nine, ten, eleven, twelve, thirteen, or fourteen mutations selected from W23L, H36L, P48A, R51L, L84F, A106V, D108N, H123Y, A142N, S146C, D147Y, E155V, I156F, and K157N in SEQ ID NO: 1, or a corresponding mutation or mutations in another adenosine deaminase (e.g., SEQ ID NO: 2-10). In some embodiments, the adenosine deaminase comprises or consists of a W23L, H36L, P48A, R51L, L84F, A106V, D108N, H123Y, A142N, S146C, D147Y, E155V, I156F, and K157N mutation in SEQ ID NO: 1, or corresponding mutations in another adenosine deaminase (e.g., SEQ ID NO: 2-10).

[0105] In some embodiments, the adenosine deaminase comprises or consists of one, two, three, four, five, six, seven, eight, nine, ten, eleven, twelve, thirteen, or fourteen mutations selected from W23X, H36X, P48X, R51X, L84X, A106X, D108X, H123X, S146X, D147X, R152X, E155X, I156X, and K157X in SEQ ID NO: 1, or a corresponding mutation or mutations in another adenosine deaminase (e.g., SEQ ID NO: 2-10), where X indicates the presence of any amino acid other than the corresponding amino acid in the wild-type adenosine deaminase. In some embodiments, the adenosine deaminase comprises or consists of one, two, three, four, five, six, seven, eight, nine, ten, eleven, twelve, thirteen, or fourteen mutations selected from W23R, H36L, P48A, R51L, L84F, A106V, D108N, H123Y, S146C, D147Y, R152P, E155V, I156F, and K157N in SEQ ID NO: 1, or a corresponding mutation or mutations in another adenosine deaminase (e.g., SEQ ID NO: 2-10). In some embodiments, the adenosine deaminse comprises or consists of a W23R, H36L, P48A, R51L, L84F, A106V, D108N, H123Y, S146C, D147Y, R152P, E155V, I156F, and K157N mutation in SEQ ID NO: 1, or corresponding mutations in another adenosine deaminase (e.g., SEQ ID NO: 2-10).

[0106] In some embodiments, the adenosine deaminase comprises or consists of one, two, three, four, five, six, seven, eight, nine, ten, eleven, twelve, thirteen, fourteen, or fifteen mutations selected from W23X, H36X, P48X, R51X, L84X, A106X, D108X, H123X, A142X, S146X, D147X, R152X, E155X, I156X, and K157X in SEQ ID NO: 1, or a corresponding mutation or mutations in another adenosine deaminase (e.g., SEQ ID NO: 2-10), where X indicates the presence of any amino acid other than the corresponding amino acid in the wild-type adenosine deaminase. In some embodiments, the adenosine deaminase comprises or consists of one, two, three, four, five, six, seven, eight, nine, ten, eleven, twelve, thirteen, fourteen, or fifteen mutations selected from W23L, H36L, P48A, R51L, L84F, A106V, D108N, H123Y, A142N, S146C, D147Y, R152P, E155V, I156F, and K157N in SEQ ID NO: 1, or a corresponding mutation or mutations in another adenosine deaminase (e.g., SEQ ID NO: 2-10). In some embodiments, the adenosine deaminase comprises or consists of a W23L, H36L, P48A, R51L, L84F, A106V, D108N, H123Y, A142N, S146C, D147Y, R152P, E155V, I156F, and K157N mutation in SEQ ID NO: 1, or corresponding mutations in another adenosine deaminase (e.g., SEQ ID NO: 2-10).

[0107] In some embodiments, the adenosine deaminase comprises one or more of the mutations provided herein corresponding to SEQ ID NO: 1, or one or more of the corresponding mutations in another deaminase. In some embodiments, the adenosine deaminase comprises or consists of a variant of SEQ ID NO: 1 provided herein, or the corresponding variant in another adenosine deaminse.

[0108] It should be appreciated that the adenosine deaminase (e.g., a first or second adenosine deaminase) may comprise one or more of the mutations provided in any of the adenosine deaminases (e.g., ecTadA adenosine deaminases) provided herein. In some embodiments, the adenosine deaminase comprises the combination of mutations of any of the adenosine deaminases (e.g., ecTadA adenosine deaminases) provided herein. For example, the adenosine deaminase may comprise the mutations W23R, H36L, P48A, R51L, L84F, A106V, D108N, H123Y, S146C, D147Y, R152P, E155V, I156F, and K157N (relative to SEQ ID NO: 1), which is shown as ABE7.10 provided herein. In some embodiments, the adenosine deaminase may comprise the mutations H36L, R51L, L84F, A106V, D108N, H123Y, S146C, D147Y, E155V, I156F, and K157N (relative to SEQ ID NO: 1). In some embodiments, the adenosine deaminase comprises any of the following combination of mutations relative to SEQ ID NO:1, where each mutation of a combination is separated by a “_” and each combination of mutations is between parentheses: (A106V_D108N), (R107C_D108N), (H8Y_D108N_S127S_D147Y_Q154H), (H8Y_R24W_D108N_N127S_D147Y_E155V), (D108N_D147Y_E155V), (H8Y_D108N_S127S), (H8Y_D108N_N127S_D147Y_Q154H), (A106V_D108N_D147Y_E155V), (D108Q_D147Y_E155V), (D108M_D147Y_E155V), (D108L_D147Y_E155V), (D108K_D147Y_E155V), (D108I_D147Y_E155V), (D108F_D147Y_E155V), (A106V_D108N_D147Y), (A106V_D108M_D147Y_E155V), (E59A_A106V_D108N_D147Y_E155V), (E59A cat dead_A106V_D108N_D147Y_E155V), (L84F_A106V_D108N_H123Y_D147Y_E155V_I156Y), (L84F_A106V_D108N_H123Y_D147Y_E155V_I156F), (D103A_DO14N), (G22P_D103A_D104N), (G22P_D103A_D104N_S138A), (D103A_D104N_S138A), (R26G_L84F_A106V_R107H_D108N_H123Y_A142N_A143D_D147Y_E155V_I156F), (E25G_R26G_L84F_A106V_R107H_D108N_H123Y_A142N_A143D_D147Y_E155V_I15 6F), (E25D_R26G_L84F_A106V_R107K_D108N_H123Y_A142N_A143G_D147Y_E155V_I15 6F), (R26Q_L84F_A106V_D108N_H123Y_A142N_D147Y_E155V_I156F), (E25M_R26G_L84F_A106V_R107P_D108N_H123Y_A142N_A143D_D147Y_E155V_I15 6F), (R26C_L84F_A106V_R107H_D108N_H123Y_A142N_D147Y_E155V_I156F), (L84F_A106V_D108N_H123Y_A142N_A143L_D147Y_E155V_I156F), (R26G_L84F_A106V_D108N_H123Y_A142N_D147Y_E155V_I156F), (E25A_R26G_L84F_A106V_R107N_D108N_H123Y_A142N_A143E_D147Y_E155V_I15 6F), (R26G_L84F_A106V_R107H_D108N_H123Y_A142N_A143D_D147Y_E155V_I156F), (A106V_D108N_A142N_D147Y_E155V), (R26G_A106V_D108N_A142N_D147Y_E155V), (E25D_R26G_A106V_R107K_D108N_A142N_A143G_D147Y_E155V), (R26G_A106V_D108N_R107H_A142N_A143D_D147Y_E155V), (E25D_R26G_A106V_D108N_A142N_D147Y_E155V), (A106V_R107K_D108N_A142N_D147Y_E155V), (A106V_D108N_A142N_A143G_D147Y_E155V), (A106V_D108N_A142N_A143L_D147Y_E155V), (H36L_R51L_L84F_A106V_D108N_H123Y_S146C_D147Y_E155V_I156F_K157N), (H36L_P48S_R51L_L84F_A106V_D108N_H123Y_S146C_D147Y_E155V_I156F_K157N), (H36L_P48S_R51L_L84F_A106V_D108N_H123Y_A142N_S146C_D147Y_E155V_I156F_K157N), (W23L_H36L_P48A_R51L_L84F_A106V_D108N_H123Y_A142N_S146C_D147Y_E155 V_I156F_K157N), (W23L_H36L_P48A_R51L_L84F_A106V_D108N_H123Y_A142N_S146C_D147Y_R152P_E155V_I156F_K157N), (N37T_P48T_M70L_L84F_A106V_D108N_H123Y_D147Y_I49V_E155V_I156F), (N37S_L84F_A106V_D108N_H123Y_D147Y_E155V_I156F_K161T), (H36L_L84F_A106V_D108N_H123Y_D147Y_Q154H_E155V_I156F), (N72S_L84F_A106V_D108N_H123Y_S146R_D147Y_E155V_I156F), (H36L_P48L_L84F_A106V_D108N_H123Y_E134G_D147Y_E155V_I156F), (H36L_L84F_A106V_D108N_H123Y_D147Y_E155V_I156F_K157N), (H36L_L84F_A106V_D108N_H123Y_S146C_D147Y_E155V_I156F), (L84F_A106V_D108N_H123Y_S146R_D147Y_E155V_I156F_K161T), (N37S_R51H_D77G_L84F_A106V_D108N_H123Y_D147Y_E155V_I156F), (R51L_L84F_A106V_D108N_H123Y_D147Y_E155V_I156F_K157N), (D24G_Q71R_L84F_H96L_A106V_D108N_H123Y_D147Y_E155V_I156F_K160E), (H36L_G67V_L84F_A106V_D108N_H123Y_S146T_D147Y_E155V_I156F), (Q71L_L84F_A106V_D108N_H123Y_L137M_A143E_D147Y_E155V_I156F), (E25G_L84F_A106V_D108N_H123Y_D147Y_E155V_I156F_Q159L), (L84F_A91T_F104I_A106V_D108N_H123Y_D147Y_E155V_I156F), (N72D_L84F_A106V_D108N_H123Y_G125A_D147Y_E155V_I156F), (P48S_L84F_S97C_A106V_D108N_H123Y_D147Y_E155V_I156F), (W23G_L84F_A106V_D108N_H123Y_D147Y_E155V_I156F), (D24G_P48L_Q71R_L84F_A106V_D108N_H123Y_D147Y_E155V_I156F_Q159L), (L84F_A106V_D108N_H123Y_A142N_D147Y_E155V_I156F), (H36L_R51L_L84F_A106V_D108N_H123Y_A142N_S146C_D147Y_E155V_I156F_K157N), (N37S_L84F_A106V_D108N_H123Y_A142N_D147Y_E155V_I156F_K161T), (L84F_A106V_D108N_D147Y_E155V_I156F), (R51L_L84F_A106V_D108N_H123Y_S146C_D147Y_E155V_I156F_K157N_K161T), (L84F_A106V_D108N_H123Y_S146C_D147Y_E155V_I156F_K161T), (L84F_A106V_D108N_H123Y_S146C_D147Y_E155V_I156F_K157N_K160E_K161T), (L84F_A106V_D108N_H123Y_S146C_D147Y_E155V_I156F_K157N_K160E), (R74Q L84F_A106V_D108N_H123Y_D147Y_E155V_I156F), (R74A_L84F_A106V_D108N_H123Y_D147Y_E155V_I156F), (L84F_A106V_D108N_H123Y_D147Y_E155V_I156F), (R74Q_L84F_A106V_D108N_H123Y_D147Y_E155V_I156F), (L84F_R98Q_A106V_D108N_H123Y_D147Y_E155V_I156F), (L84F_A106V_D108N_H123Y_R129Q_D147Y_E155V_I156F), (P48S_L84F_A106V_D108N_H123Y_A142N_D147Y_E155V_I156F), (P48S_A142N), (P48T_I49V_L84F_A106V_D108N_H123Y_A142N_D147Y_E155V_I156F_L157N), (P48T_149V_A142N), (H36L_P48S_R51L_L84F_A106V_D108N_H123Y_S146C_D147Y_E155V_I156F_K157N), (H36L_P48S_R51L_L84F_A106V_D108N_H123Y_S146C_A142N_D147Y_E155V_I156F_K157N), (H36L_P48T_149V_R51L_L84F_A106V_D108N_H123Y_S146C_D147Y_E155V_I156F_K157N), (H36L_P48T_149V_R51L_L84F_A106V_D108N_H123Y_A142N_S146C_D147Y_E155V_I156F_K157N), (H36L_P48A_R51L_L84F_A106V_D108N_H123Y_S146C_D147Y_E155V_I156F_K157N), (H36L_P48A_R51L_L84F_A106V_D108N_H123Y_A142N_S146C_D147Y_E155V_I156F_K157N), (H36L_P48A_R51L_L84F_A106V_D108N_H123Y_S146C_A142N_D147Y_E155V_I156F_K157N), (W23L_H36L_P48A_R51L_L84F_A106V_D108N_H123Y_S146C_D147Y_E155V_1l56F_K157N), (W23R_H36L_P48A_R51L_L84F_A106V_D108N_H123Y_S146C_D147Y_E155V_I156F_K157N), (W23L_H36L_P48A_R51L_L84F_A106V_D108N_H123Y_S146R_D147Y_E155V_1l56F_K161T), (H36L_P48A_R51L_L84F_A106V_D108N_H123Y_S146C_D147Y_R152H_E155V_I156F_K157N), (H36L_P48A_R51L_L84F_A106V_D108N_H123Y_S146C_D147Y_R152P_E155V_I156F_K157N), (W23L_H36L_P48A_R51L_L84F_A106V_D108N_H123Y_S146C_D147Y_R152P_E155V_I156F_K157N), (W23L_H36L_P48A_R51L_L84F_A106V_D108N_H123Y_A142A_S146C_D147Y_E155 V_I156F_K157N), (W23L_H36L_P48A_R51L_L84F_A106V_D108N_H123Y_A142A_S146C_D147Y_R152P_E155V_I156F_K157N), (W23L_H36L_P48A_R51L_L84F_A106V_D108N_H123Y_S146R_D147Y_E155V_1l56F_K161T), (W23R_H36L_P48A_R51L_L84F_A106V_D108N_H123Y_S146C_D147Y_R152P_E155V_I156F_K157N), (H36L_P48A_R51L_L84F_A106V_D108N_H123Y_A142N_S146C_D147Y_R152P_E155 V_I156F_K157N).

[0109] In some embodiments, the adenosine deaminase comprises an amino acid sequence that is at least 60%, 65%, 70%, 75%, 80%, 85%, 90%, 95, 98%, 99%, or 99.5% identical to any one of SEQ ID NOs: 1-10, or any of the adenosine deaminases provided herein. In some embodiments, the adenosine deaminase comprises an amino acid sequence that has 1, 2, 3, 4, 5, 6, 7, 8, 9, 10, 11, 12, 13, 14, 15, 16, 17, 18, 19, 20, 21, 22, 21, 24, 25, 26, 27, 28, 29, 30, 31, 32, 33, 34, 35, 36, 37, 38, 39, 40, 41, 42, 43, 44, 45, 46, 47, 48, 49, 50 or more mutations compared to any one of the amino acid sequences set forth in SEQ ID NOs: 1-10, or any of the adenosine deaminases provided herein. In some embodiments, the adenosine deaminase comprises an amino acid sequence that has at least 5, at least 10, at least 15, at least 20, at least 25, at least 30, at least 35, at least 40, at least 45, at least 50, at least 60, at least 70, at least 80, at least 90, at least 100, at least 110, at least 120, at least 130, at least 140, at least 150, at least 160, or at least 166, identical contiguous amino acid residues as compared to any one of the amino acid sequences set forth in SEQ ID NOs: 1-10, or any of the adenosine deaminases provided herein. In some embodiments, the adenosine deaminase comprises the amino acid sequence of any one of SEQ ID NOs: 1-10, or any of the adenosine deaminases provided herein. In some embodiments, the adenosine deaminase consists of the amino acid sequence of any one of SEQ ID NOs: 1-10, or any of the adenosine deaminases provided herein. The ecTadA sequences provided below are from ecTadA (SEQ ID NO: 1), absent the N-terminal methionine (M). For clarity, the amino acid numbering scheme used to identify the various amino acid mutations is derived from ecTadA (SEQ ID NO: 1) for E. coli TadA.

### The Cas9 Domain of Base Editors, or Equivalent

[0110] The base editors provided by the instant specification include any suitable Cas9 moiety or equivalent protein, such as a CRISPR associated protein 9, or functional fragment thereof, and embraces any naturally-occurring Cas9 from any organism, any naturally-occurring Cas9 equivalent or functional fragment thereof, any Cas9 homolog, ortholog, or paralog from any organism, and any mutant or variant of a Cas9, naturally-occurring or engineered. More broadly, a Cas9 is a type of “RNA-programmable nuclease” or “RNA-guided nuclease” or “nucleic acid programmable DNA-binding protein.” The terms napDNA/RNAbp or Cas9 are not meant to be particularly limiting. The present disclosure is unlimited with regard to the particular napDNA/RNAbp, Cas9 or Cas9 equivalent that is employed in the improved base editors of the invention.

[0111] In some embodiments, the napDNA/RNAbp is a Cas moiety.

[0112] In various embodiments, the Cas moiety is a S. pyogenes Cas9, which has been widely used as a tool for genome engineering. This Cas9 protein is a large, multi-domain protein containing two distinct nuclease domains. Mutations, (e.g., point mutations) can be introduced into Cas9 to abolish nuclease activity of one or both of the nuclease domains, resulting in a dead Cas9 (dCas9), or a Cas9 nickase (nCas9) that still retains its ability to bind DNA in a sgRNA-programmed manner. In principle, when fused to another protein or domain, dCas9 or nCas9 can target that protein to virtually any DNA sequence simply by co-expression with an appropriate sgRNA.

[0113] In other embodiments, the Cas moiety is a Cas9 from: Corynebacterium ulcerans (NCBI Refs: NC_015683.1, NC_017317.1); Corynebacterium diphtheria (NCBI Refs: NC_016782.1, NC_016786.1); Spiroplasma syrphidicola (NCBI Ref: NC_021284.1); Prevotella intermedia (NCBI Ref: NC_017861.1); Spiroplasma taiwanense (NCBI Ref: NC_021846.1); Streptococcus iniae (NCBI Ref: NC_021314.1); Belliella baltica (NCBI Ref: NC_018010.1); Psychroflexus torquisI (NCBI Ref: NC_018721.1); Streptococcus thermophilus (NCBI Ref: YP_820832.1); Listeria innocua (NCBI Ref: NP_472073.1); Campylobacter jejuni (NCBI Ref: YP_002344900.1); or Neisseria. meningitidis (NCBI Ref: YP_002342100.1).

[0114] In still other embodiments, the Cas moiety may include any CRISPR associated protein, including but not limited to, Cas1, Cas1B, Cas2, Cas3, Cas4, Cas5, Cas6, Cas7, Cas8, Cas9 (also known as Csn1 and Csx12), Cas10, Csy1, Csy2, Csy3, Cse1, Cse2, Csc1, Csc2, Csa5, Csn2, Csm2, Csm3, Csm4, Csm5, Csm6, Cmr1, Cmr3, Cmr4, Cmr5, Cmr6, Csb1, Csb2, Csb3, Csx17, Csx14, Csx10, Csx16, CsaX, Csx3, Csx1, Csx15, Csf1, Csf2, Csf3, Csf4, homologs thereof, or modified versions thereof. These enzymes are known; for example, the amino acid sequence of S. pyogenes Cas9 protein may be found in the SwissProt database under accession number Q99ZW2. In some embodiments, the unmodified CRISPR enzyme has DNA cleavage activity, such as Cas9. In some embodiments the CRISPR enzyme is Cas9, and may be Cas9 from S. pyogenes or S. pneumoniae. In some embodiments, the CRISPR enzyme directs cleavage of one or both strands at the location of a target sequence, such as within the target sequence and/or within the complement of the target sequence. In some embodiments, the CRISPR enzyme directs cleavage of one or both strands within about 1, 2, 3, 4, 5, 6, 7, 8, 9, 10, 15, 20, 25, 50, 100, 200, 500, or more base pairs from the first or last nucleotide of a target sequence. In some embodiments, a vector encodes a CRISPR enzyme that is mutated to with respect to a corresponding wild-type enzyme such that the mutated CRISPR enzyme lacks the ability to cleave one or both strands of a target polynucleotide containing a target sequence. For example, an aspartate-to-alanine substitution (D10A) in the RuvC I catalytic domain of Cas9 from S. pyogenes converts Cas9 from a nuclease that cleaves both strands to a nickase (cleaves a single strand). Other examples of mutations that render Cas9 a nickase include, without limitation, H840A, N854A, and N863A.

[0115] A Cas moiety may also be referred to as a casn1 nuclease or a CRISPR (clustered regularly interspaced short palindromic repeat)-associated nuclease. As outlined above, CRISPR is an adaptive immune system that provides protection against mobile genetic elements (viruses, transposable elements and conjugative plasmids). CRISPR clusters contain spacers, sequences complementary to antecedent mobile elements, and target invading nucleic acids. CRISPR clusters are transcribed and processed into CRISPR RNA (crRNA). In type II CRISPR systems correct processing of pre-crRNA requires a trans-encoded small RNA (tracrRNA), endogenous ribonuclease 3 (mc) and a Cas9 protein. The tracrRNA serves as a guide for ribonuclease 3-aided processing of pre-crRNA. Subsequently, Cas9/crRNA/tracrRNA endonucleolytically cleaves linear or circular dsDNA target complementary to the spacer. The target strand not complementary to crRNA is first cut endonucleolytically, then trimmed 3′-5′ exonucleolytically. In nature, DNA-binding and cleavage typically requires protein and both RNAs. However, single guide RNAs (“sgRNA”, or simply “gNRA”) can be engineered so as to incorporate aspects of both the crRNA and tracrRNA into a single RNA species. See, e.g., Jinek M., Chylinski K., Fonfara I., Hauer M., Doudna J. A., Charpentier E. Science 337:816-821(2012), the entire contents of which is hereby incorporated by reference.

[0116] Cas9 and equivalents recognizes a short motif in the CRISPR repeat sequences (the PAM or protospacer adjacent motif) to help distinguish self versus non-self. As noted herein, Cas9 nuclease sequences and structures are well known to those of skill in the art (see, e.g., “Complete genome sequence of an M1 strain of Streptococcus pyogenes.” Ferretti et al., J. J., McShan W. M., Ajdic D. J., Savic D. J., Savic G., Lyon K., Primeaux C., Sezate S., Suvorov A. N., Kenton S., Lai H. S., Lin S. P., Qian Y., Jia H. G., Najar F. Z., Ren Q., Zhu H., Song L., White J., Yuan X., Clifton S. W., Roe B. A., McLaughlin R. E., Proc. Natl. Acad. Sci. U.S.A. 98:4658-4663(2001); “CRISPR RNA maturation by trans-encoded small RNA and host factor RNase III.” Deltcheva E., Chylinski K., Sharma C. M., Gonzales K., Chao Y., Pirzada Z. A., Eckert M. R., Vogel J., Charpentier E., Nature 471:602-607(2011); and “A programmable dual-RNA-guided DNA endonuclease in adaptive bacterial immunity.” Jinek M., Chylinski K., Fonfara I., Hauer M., Doudna J. A., Charpentier E. Science 337:816-821(2012), the entire contents of each of which are incorporated herein by reference).

[0117] The Cas moiety may include any suitable homologs and/or orthologs. Cas9 homologs and/or orthologs have been described in various species, including, but not limited to, S. pyogenes and S. thermophilus. Additional suitable Cas9 nucleases and sequences will be apparent to those of skill in the art based on this disclosure, and such Cas9 nucleases and sequences include Cas9 sequences from the organisms and loci disclosed in Chylinski, Rhun, and Charpentier, “The tracrRNA and Cas9 families of type II CRISPR-Cas immunity systems” (2013) RNA Biology 10:5, 726-737; the entire contents of which are incorporated herein by reference. In some embodiments, a Cas9 nuclease has an inactive (e.g., an inactivated) DNA cleavage domain, that is, the Cas9 is a nickase.

[0118] In various embodiments, the improved base editors may comprise a nuclease-inactivated Cas protein may interchangeably be referred to as a “dCas” or “dCas9” protein (for nuclease-“dead” Cas9). Methods for generating a Cas9 protein (or a fragment thereof) having an inactive DNA cleavage domain are known (See, e.g., Jinek et al., Science. 337:816-821(2012); Qi et al., “Repurposing CRISPR as an RNA-Guided Platform for Sequence-Specific Control of Gene Expression” (2013) Cell. 28; 152(5):1173-83, the entire contents of each of which are incorporated herein by reference). For example, the DNA cleavage domain of Cas9 is known to include two subdomains, the HNH nuclease subdomain and the RuvC1 subdomain. The HNH subdomain cleaves the strand complementary to the gRNA, whereas the RuvC1 subdomain cleaves the non-complementary strand. Mutations within these subdomains can silence the nuclease activity of Cas9. For example, the mutations D10A and H840A completely inactivate the nuclease activity of S. pyogenes Cas9 (Jinek et al., Science. 337:816-821(2012); Qi et al., Cell. 28; 152(5):1173-83 (2013)). In some embodiments, proteins comprising fragments of Cas9 are provided. For example, in some embodiments, a protein comprises one of two Cas9 domains: (1) the gRNA binding domain of Cas9; or (2) the DNA cleavage domain of Cas9.

[0119] In some embodiments, proteins comprising Cas9 or fragments thereof are referred to as “Cas9 variants.” A Cas9 variant shares homology to Cas9, or a fragment thereof. For example a Cas9 variant is at least about 70% identical, at least about 80% identical, at least about 90% identical, at least about 95% identical, at least about 96% identical, at least about 97% identical, at least about 98% identical, at least about 99% identical, at least about 99.5% identical, or at least about 99.9% identical to wild type Cas9. In some embodiments, the Cas9 variant may have 1, 2, 3, 4, 5, 6, 7, 8, 9, 10, 11, 12, 13, 14, 15, 16, 17, 18, 19, 20, 21, 22, 21, 24, 25, 26, 27, 28, 29, 30, 31, 32, 33, 34, 35, 36, 37, 38, 39, 40, 41, 42, 43, 44, 45, 46, 47, 48, 49, 50 or more amino acid changes compared to a wild type Cas9. In some embodiments, the Cas9 variant comprises a fragment of Cas9 (e.g., a gRNA binding domain or a DNA-cleavage domain), such that the fragment is at least about 70% identical, at least about 80% identical, at least about 90% identical, at least about 95% identical, at least about 96% identical, at least about 97% identical, at least about 98% identical, at least about 99% identical, at least about 99.5% identical, or at least about 99.9% identical to the corresponding fragment of wild type Cas9. In some embodiments, the fragment is at least 30%, at least 35%, at least 40%, at least 45%, at least 50%, at least 55%, at least 60%, at least 65%, at least 70%, at least 75%, at least 80%, at least 85%, at least 90%, at least 95% identical, at least 96%, at least 97%, at least 98%, at least 99%, or at least 99.5% of the amino acid length of a corresponding wild-type Cas9.

[0120] In some embodiments, the Cas9 fragment is at least 100 amino acids in length. In some embodiments, the fragment is at least 100, 150, 200, 250, 300, 350, 400, 450, 500, 550, 600, 650, 700, 750, 800, 850, 900, 950, 1000, 1050, 1100, 1150, 1200, 1250, or at least 1300 amino acids in length. In some embodiments, wild-type Cas9 corresponds to Cas9 from Streptococcus pyogenes (NCBI Reference Sequence: NC_017053.1). In other embodiments, wild type Cas9 corresponds to Cas9 from Streptococcus pyogenes (NCBI Reference Sequence: NC_002737.2). In still other embodiments, Cas9 corresponds to, or comprises in part or in whole, a Cas9 amino acid sequence having one or more mutations that inactivate the Cas9 nuclease activity.

[0121] In some embodiments, the Cas9 domain comprises a D10A mutation, while the residue at position 840 relative to a wild type sequence such as Cas9 from Streptococcus pyogenes (NCBI Reference Sequence: NC_017053.1).

[0122] Without wishing to be bound by any particular theory, the presence of the catalytic residue H840 restores the activity of the Cas9 to cleave the non-edited (e.g., non-deaminated) strand containing a G opposite the targeted C. Restoration of H840 (e.g., from A840) does not result in the cleavage of the target strand containing the C. Such Cas9 variants are able to generate a single-strand DNA break (nick) at a specific location based on the gRNA-defined target sequence, leading to repair of the non-edited strand. In the context of an adenosine base editor, an adenosine (A) is deaminated to an inosine (I) and the non-edited strand (including the T that base-paired with the deaminated A) is nicked, facilitating removal of the T that base-paired with the deaminated A and resulting in a A-T base pair being mutated to a G-C base pair. Nicking the non-edited strand, having the T, facilitates removal of the T via mismatch repair mechanisms.

[0123] In other embodiments, dCas9 variants having mutations other than D10A and H840A are provided, which, e.g., result in nuclease inactivated Cas9 (dCas9). Such mutations, by way of example, include other amino acid substitutions at D10 and H820, or other substitutions within the nuclease domains of Cas9 (e.g., substitutions in the HNH nuclease subdomain and/or the RuvC1 subdomain) with reference to a wild type sequence such as Cas9 from Streptococcus pyogenes (NCBI Reference Sequence: NC_017053.1). In some embodiments, variants or homologues of dCas9 (e.g., variants of Cas9 from Streptococcus pyogenes (NCBI Reference Sequence: NC_017053.1)) are provided which are at least about 70% identical, at least about 80% identical, at least about 90% identical, at least about 95% identical, at least about 98% identical, at least about 99% identical, at least about 99.5% identical, or at least about 99.9% identical to NCBI Reference Sequence: NC_017053.1. In some embodiments, variants of dCas9 (e.g., variants of NCBI Reference Sequence: NC_017053.1) are provided having amino acid sequences which are shorter, or longer than NC_017053.1 by about 5 amino acids, by about 10 amino acids, by about 15 amino acids, by about 20 amino acids, by about 25 amino acids, by about 30 amino acids, by about 40 amino acids, by about 50 amino acids, by about 75 amino acids, by about 100 amino acids or more.

[0124] In some embodiments, the base editors as provided herein comprise the full-length amino acid sequence of a Cas9 protein, e.g., one of the Cas9 sequences provided herein. In other embodiments, however, fusion proteins as provided herein do not comprise a full-length Cas9 sequence, but only a fragment thereof. For example, in some embodiments, a Cas9 fusion protein provided herein comprises a Cas9 fragment, wherein the fragment binds crRNA and tracrRNA or sgRNA, but does not comprise a functional nuclease domain, e.g., in that it comprises only a truncated version of a nuclease domain or no nuclease domain at all. Exemplary amino acid sequences of suitable Cas9 domains and Cas9 fragments are provided herein, and additional suitable sequences of Cas9 domains and fragments will be apparent to those of skill in the art.

[0125] It should be appreciated that additional Cas9 proteins (e.g., a nuclease dead Cas9 (dCas9), a Cas9 nickase (nCas9), or a nuclease active Cas9), including variants and homologs thereof, are within the scope of this disclosure. Exemplary Cas9 proteins include, without limitation, those provided below. In some embodiments, the Cas9 protein is a nuclease dead Cas9 (dCas9). In some embodiments, the dCas9 comprises the amino acid sequence (SEQ ID NO: 11). In some embodiments, the Cas9 protein is a Cas9 nickase (nCas9). In some embodiments, the nCas9 comprises the amino acid sequence (SEQ ID NO: 12). In some embodiments, the Cas9 protein is a nuclease active Cas9. In some embodiments, the nuclease active Cas9 comprises the amino acid sequence (SEQ ID NO: 13).

Exemplary catalytically inactive Cas9 (dCas9) (SEQ ID NO: 11):
(SEQ ID NO: 11)
DKKYSIGLAIGTNSVGWAVITDEYKVPSKKFKVLGNTDRHSIKKNLIGALLFD
SGETAEATRLKRTARRRYTRRKNRICYLQEIFSNEMAKVDDSFFHRLEESFLVEEDK
KHERHPIFGNIVDEVAYHEKYPTIYHLRKKLVDSTDKADLRLIYLALAHMIKFRGHFL
IEGDLNPDNSDVDKLFIQLVQTYNQLFEENPINASGVDAKAILSARLSKSRRLENLIAQ
LPGEKKNGLFGNLIALSLGLTPNFKSNFDLAEDAKLQLSKDTYDDDLDNLLAQIGDQ
YADLFLAAKNLSDAILLSDILRVNTEITKAPLSASMIKRYDEHHQDLTLLKALVRQQL
PEKYKEIFFDQSKNGYAGYIDGGASQEEFYKFIKPILEKMDGTEELLVKLNREDLLRK
QRTFDNGSIPHQIHLGELHAILRRQEDFYPFLKDNREKIEKILTFRIPYYVGPLARGNS
RFAWMTRKSEETITPWNFEEVVDKGASAQSFIERMTNFDKNLPNEKVLPKHSLLYEY
FTVYNELTKVKYVTEGMRKPAFLSGEQKKAIVDLLFKTNRKVTVKQLKEDYFKKIE
CFDSVEISGVEDRFNASLGTYHDLLKIIKDKDFLDNEENEDILEDIVLTLTLFEDREMIE
ERLKTYAHLFDDKVMKQLKRRRYTGWGRLSRKLINGIRDKQSGKTILDFLKSDGFA
NRNFMQLIHDDSLTFKEDIQKAQVSGQGDSLHEHIANLAGSPAIKKGILQTVKVVDE
LVKVMGRHKPENIVIEMARENQTTQKGQKNSRERMKRIEEGIKELGSQILKEHPVEN
TQLQNEKLYLYYLQNGRDMYVDQELDINRLSDYDVDAIVPQSFLKDDSIDNKVLTR
SDKNRGKSDNVPSEEVVKKMKNYWRQLLNAKLITQRKFDNLTKAERGGLSELDKA
GFIKRQLVETRQITKHVAQILDSRMNTKYDENDKLIREVKVITLKSKLVSDFRKDFQF
YKVREINNYHHAHDAYLNAVVGTALIKKYPKLESEFVYGDYKVYDVRKMIAKSEQ
EIGKATAKYFFYSNIMNFFKTEITLANGEIRKRPLIETNGETGEIVWDKGRDFATVRK
VLSMPQVNIVKKTEVQTGGFSKESILPKRNSDKLIARKKDWDPKKYGGFDSPTVAYS
VLVVAKVEKGKSKKLKSVKELLGITIMERSSFEKNPIDFLEAKGYKEVKKDLIIKLPK
YSLFELENGRKRMLASAGELQKGNELALPSKYVNFLYLASHYEKLKGSPEDNEQKQ
LFVEQHKHYLDEIIEQISEFSKRVILADANLDKVLSAYNKHRDKPIREQAENIIHLFTLT
NLGAPAAFKYFDTTIDRKRYTSTKEVLDATLIHQSITGLYETRIDLSQLGGD
Exemplary Cas9 nickase (nCas9) (SEQ ID NO: 12):
(SEQ ID NO: 12)
DKKYSIGLAIGTNSVGWAVITDEYKVPSKKFKVLGNTDRHSIKKNLIGALLFD
SGETAEATRLKRTARRRYTRRKNRICYLQEIFSNEMAKVDDSFFHRLEESFLVEEDK
KHERHPIFGNIVDEVAYHEKYPTIYHLRKKLVDSTDKADLRLIYLALAHMIKFRGHFL
IEGDLNPDNSDVDKLFIQLVQTYNQLFEENPINASGVDAKAILSARLSKSRRLENLIAQ
LPGEKKNGLFGNLIALSLGLTPNFKSNFDLAEDAKLQLSKDTYDDDLDNLLAQIGDQ
YADLFLAAKNLSDAILLSDILRVNTEITKAPLSASMIKRYDEHHQDLTLLKALVRQQL
PEKYKEIFFDQSKNGYAGYIDGGASQEEFYKFIKPILEKMDGTEELLVKLNREDLLRK
QRTFDNGSIPHQIHLGELHAILRRQEDFYPFLKDNREKIEKILTFRIPYYVGPLARGNS
RFAWMTRKSEETITPWNFEEVVDKGASAQSFIERMTNFDKNLPNEKVLPKHSLLYEY
FTVYNELTKVKYVTEGMRKPAFLSGEQKKAIVDLLFKTNRKVTVKQLKEDYFKKIE
CFDSVEISGVEDRFNASLGTYHDLLKIIKDKDFLDNEENEDILEDIVLTLTLFEDREMIE
ERLKTYAHLFDDKVMKQLKRRRYTGWGRLSRKLINGIRDKQSGKTILDFLKSDGFA
NRNFMQLIHDDSLTFKEDIQKAQVSGQGDSLHEHIANLAGSPAIKKGILQTVKVVDE
LVKVMGRHKPENIVIEMARENQTTQKGQKNSRERMKRIEEGIKELGSQILKEHPVEN
TQLQNEKLYLYYLQNGRDMYVDQELDINRLSDYDVDHIVPQSFLKDDSIDNKVLTR
SDKNRGKSDNVPSEEVVKKMKNYWRQLLNAKLITQRKFDNLTKAERGGLSELDKA
GFIKRQLVETRQITKHVAQILDSRMNTKYDENDKLIREVKVITLKSKLVSDFRKDFQF
YKVREINNYHHAHDAYLNAVVGTALIKKYPKLESEFVYGDYKVYDVRKMIAKSEQ
EIGKATAKYFFYSNIMNFFKTEITLANGEIRKRPLIETNGETGEIVWDKGRDFATVRK
VLSMPQVNIVKKTEVQTGGFSKESILPKRNSDKLIARKKDWDPKKYGGFDSPTVAYS
VLVVAKVEKGKSKKLKSVKELLGITIMERSSFEKNPIDFLEAKGYKEVKKDLIIKLPK
YSLFELENGRKRMLASAGELQKGNELALPSKYVNFLYLASHYEKLKGSPEDNEQKQ
LFVEQHKHYLDEIIEQISEFSKRVILADANLDKVLSAYNKHRDKPIREQAENIIHLFTLT
NLGAPAAFKYFDTTIDRKRYTSTKEVLDATLIHQSITGLYETRIDLSQLGGD
Exemplary catalytically active Cas9 (SEQ ID NO: 13):
(SEQ ID NO: 13)
DKKYSIGLDIGTNSVGWAVITDEYKVPSKKFKVLGNTDRHSIKKNLIGALLFD
SGETAEATRLKRTARRRYTRRKNRICYLQEIFSNEMAKVDDSFFHRLEESFLVEEDK
KHERHPIFGNIVDEVAYHEKYPTIYHLRKKLVDSTDKADLRLIYLALAHMIKFRGHFL
IEGDLNPDNSDVDKLFIQLVQTYNQLFEENPINASGVDAKAILSARLSKSRRLENLIAQ
LPGEKKNGLFGNLIALSLGLTPNFKSNFDLAEDAKLQLSKDTYDDDLDNLLAQIGDQ
YADLFLAAKNLSDAILLSDILRVNTEITKAPLSASMIKRYDEHHQDLTLLKALVRQQL
PEKYKEIFFDQSKNGYAGYIDGGASQEEFYKFIKPILEKMDGTEELLVKLNREDLLRK
QRTFDNGSIPHQIHLGELHAILRRQEDFYPFLKDNREKIEKILTFRIPYYVGPLARGNS
RFAWMTRKSEETITPWNFEEVVDKGASAQSFIERMTNFDKNLPNEKVLPKHSLLYEY
FTVYNELTKVKYVTEGMRKPAFLSGEQKKAIVDLLFKTNRKVTVKQLKEDYFKKIE
CFDSVEISGVEDRFNASLGTYHDLLKIIKDKDFLDNEENEDILEDIVLTLTLFEDREMIE
ERLKTYAHLFDDKVMKQLKRRRYTGWGRLSRKLINGIRDKQSGKTILDFLKSDGFA
NRNFMQLIHDDSLTFKEDIQKAQVSGQGDSLHEHIANLAGSPAIKKGILQTVKVVDE
LVKVMGRHKPENIVIEMARENQTTQKGQKNSRERMKRIEEGIKELGSQILKEHPVEN
TQLQNEKLYLYYLQNGRDMYVDQELDINRLSDYDVDHIVPQSFLKDDSIDNKVLTR
SDKNRGKSDNVPSEEVVKKMKNYWRQLLNAKLITQRKFDNLTKAERGGLSELDKA
GFIKRQLVETRQITKHVAQILDSRMNTKYDENDKLIREVKVITLKSKLVSDFRKDFQF
YKVREINNYHHAHDAYLNAVVGTALIKKYPKLESEFVYGDYKVYDVRKMIAKSEQ
EIGKATAKYFFYSNIMNFFKTEITLANGEIRKRPLIETNGETGEIVWDKGRDFATVRK
VLSMPQVNIVKKTEVQTGGFSKESILPKRNSDKLIARKKDWDPKKYGGFDSPTVAYS
VLVVAKVEKGKSKKLKSVKELLGITIMERSSFEKNPIDFLEAKGYKEVKKDLIIKLPK
YSLFELENGRKRMLASAGELQKGNELALPSKYVNFLYLASHYEKLKGSPEDNEQKQ
LFVEQHKHYLDEIIEQISEFSKRVILADANLDKVLSAYNKHRDKPIREQAENIIHLFTLT
NLGAPAAFKYFDTTIDRKRYTSTKEVLDATLIHQSITGLYETRIDLSQLGGD.

[0126] In some embodiments, a Cas moiety refers to a Cas9 or Cas9 homolog from archaea (e.g. nanoarchaea), which constitute a domain and kingdom of single-celled prokaryotic microbes. In some embodiments, Cas9 refers to CasX or CasY, which have been described in, for example, Burstein et al., “New CRISPR-Cas systems from uncultivated microbes.” Cell Res. 2017 Feb. 21. doi: 10.1038/cr.2017.21, the entire contents of which is hereby incorporated by reference. Using genome-resolved metagenomics, a number of CRISPR-Cas systems were identified, including the first reported Cas9 in the archaeal domain of life. This divergent Cas9 protein was found in little-studied nanoarchaea as part of an active CRISPR-Cas system. In bacteria, two previously unknown systems were discovered, CRISPR-CasX and CRISPR-CasY, which are among the most compact systems yet discovered. In some embodiments, Cas9 refers to CasX, or a variant of CasX. In some embodiments, Cas9 refers to a CasY, or a variant of CasY. It should be appreciated that other RNA-guided DNA binding proteins may be used as a nucleic acid programmable DNA binding protein (napDNAbp), and are within the scope of this disclosure.

[0127] In some embodiments, the Cas9 moiety is a nucleic acid programmable DNA binding protein (napDNAbp) of any of the fusion proteins provided herein may be a CasX or CasY protein. In some embodiments, the napDNAbp is a CasX protein. In some embodiments, the napDNAbp is a CasY protein. In some embodiments, the napDNAbp comprises an amino acid sequence that is at least 85%, at least 90%, at least 91%, at least 92%, at least 93%, at least 94%, at least 95%, at least 96%, at least 97%, at least 98%, at least 99%, or at least 99.5% identical to a naturally-occurring CasX or CasY protein. In some embodiments, the napDNAbp is a naturally-occurring CasX or CasY protein. In some embodiments, the napDNAbp comprises an amino acid sequence that is at least 85%, at least 90%, at least 91%, at least 92%, at least 93%, at least 94%, at least 95%, at least 96%, at least 97%, at least 98%, at least 99%, or at least 99.5% identical to a wild-type Cas moiety or any Cas moiety provided herein. In some embodiments, the napDNAbp comprises an amino acid sequence of any one of SEQ ID NOs: 14-16. It should be appreciated that CasX and CasY from other bacterial species may also be used in accordance with the present disclosure. These sequences are shown below.

CasX (uniprot.org/uniprot/F0NN87; uniprot.org/uniprot/F0NH53)
>tr|F0NN87|F0NN87_SULIH CRISPR-associated Casx protein OS = Sulfolobus
islandicus (strain HVE10/4) GN = SiH_0402 PE = 4 SV = 1
(SEQ ID NO: 14)
MEVPLYNIFGDNYIIQVATEAENSTIYNNKVEIDDEELRNVLNLAYKIAKNNE
DAAAERRGKAKKKKGEEGETTTSNIILPLSGNDKNPWTETLKCYNFPTTVALSEVFK
NFSQVKECEEVSAPSFVKPEFYEFGRSPGMVERTRRVKLEVEPHYLIIAAAGWVLTR
LGKAKVSEGDYVGVNVFTPTRGILYSLIQNVNGIVPGIKPETAFGLWIARKVVSSVTN
PNVSVVRIYTISDAVGQNPTTINGGFSIDLTKLLEKRYLLSERLEAIARNALSISSNMRE
RYIVLANYIYEYLTGSKRLEDLLYFANRDLIMNLNSDDGKVRDLKLISAYVNGELIRG
EG
CasX OS = Sulfolobus islandicus (strain REY15A)
>tr|F0NH53|F0NH53_SULIR CRISPR associated protein, CasX OS = Sulfolobus
islandicus (strain REY15A) GN = SiRe_0771 PE = 4 SV = 1
(SEQ ID NO: 15)
MEVPLYNIFGDNYIIQVATEAENSTIYNNKVEIDDEELRNVLNLAYKIAKNNE
DAAAERRGKAKKKKGEEGETTTSNIILPLSGNDKNPWTETLKCYNFPTTVALSEVFK
NFSQVKECEEVSAPSFVKPEFYKFGRSPGMVERTRRVKLEVEPHYLIMAAAGWVLT
RLGKAKVSEGDYVGVNVFTPTRGILYSLIQNVNGIVPGIKPETAFGLWIARKVVSSVT
NPNVSVVSIYTISDAVGQNPTTINGGFSIDLTKLLEKRDLLSERLEAIARNALSISSNMR
ERYIVLANYIYEYLTGSKRLEDLLYFANRDLIMNLNSDDGKVRDLKLISAYVNGELIR
GEG
CasY (ncbi.nlm.nih.gov/protein/APG80656.1)
>APG80656.1 CRISPR-associated protein CasY [uncultured Parcubacteria group
bacterium]
(SEQ ID NO: 16)
MSKRHPRISGVKGYRLHAQRLEYTGKSGAMRTIKYPLYSSPSGGRTVPREIVS
AINDDYVGLYGLSNFDDLYNAEKRNEEKVYSVLDFWYDCVQYGAVFSYTAPGLLK
NVAEVRGGSYELTKTLKGSHLYDELQIDKVIKFLNKKEISRANGSLDKLKKDIIDCFK
AEYRERHKDQCNKLADDIKNAKKDAGASLGERQKKLFRDFFGISEQSENDKPSFTNP
LNLTCCLLPFDTVNNNRNRGEVLENKLKEYAQKLDKNEGSLEMWEYIGIGNSGTAFS
NFLGEGFLGRLRENKITELKKAMMDITDAWRGQEQEEELEKRLRILAALTIKLREPKF
DNHWGGYRSDINGKLSSWLQNYINQTVKIKEDLKGHKKDLKKAKEMINRFGESDTK
EEAVVSSLLESIEKIVPDDSADDEKPDIPAIAIYRRFLSDGRLTLNRFVQREDVQEALIK
ERLEAEKKKKPKKRKKKSDAEDEKETIDFKELFPHLAKPLKLVPNFYGDSKRELYKK
YKNAAIYTDALWKAVEKIYKSAFSSSLKNSFFDTDFDKDFFIKRLQKIFSVYRRFNTD
KWKPIVKNSFAPYCDIVSLAENEVLYKPKQSRSRKSAAIDKNRVRLPSTENIAKAGIA
LARELSVAGFDWKDLLKKEEHEEYIDLIELHKTALALLLAVTETQLDISALDFVENGT
VKDFMKTRDGNLVLEGRFLEMFSQSIVFSELRGLAGLMSRKEFITRSAIQTMNGKQA
ELLYIPHEFQSAKITTPKEMSRAFLDLAPAEFATSLEPESLSEKSLLKLKQMRYYPHYF
GYELTRTGQGIDGGVAENALRLEKSPVKKREIKCKQYKTLGRGQNKIVLYVRSSYY
QTQFLEWFLHRPKNVQTDVAVSGSFLIDEKKVKTRWNYDALTVALEPVSGSERVFV
SQPFTIFPEKSAEEEGQRYLGIDIGEYGIAYTALEITGDSAKILDQNFISDPQLKTLREE
VKGLKLDQRRGTFAMPSTKIARIRESLVHSLRNRIHHLALKHKAKIVYELEVSRFEEG
KQKIKKVYATLKKADVYSEIDADKNLQTTVWGKLAVASEISASYTSQFCGACKKLW
RAEMQVDETITTQELIGTVRVIKGGTLIDAIKDFMRPPIFDENDTPFPKYRDFCDKHHI
SKKMRGNSCLFICPFCRANADADIQASQTIALLRYVKEEKKVEDYFE

[0128] In various embodiments, the nucleic acid programmable DNA binding proteins include, without limitation, Cas9 (e.g., dCas9 and nCas9), CasX, CasY, Cpf1, C2c1, C2c2, C2C3, and Argonaute. One example of a nucleic acid programmable DNA-binding protein that has different PAM specificity than Cas9 is Clustered Regularly Interspaced Short Palindromic Repeats from Prevotella and Francisella 1 (Cpf1). Similar to Cas9, Cpf1 is also a class 2 CRISPR effector. It has been shown that Cpf1 mediates robust DNA interference with features distinct from Cas9. Cpf1 is a single RNA-guided endonuclease lacking tracrRNA, and it utilizes a T-rich protospacer-adjacent motif (TTN, TTTN, or YTN). Moreover, Cpf1 cleaves DNA via a staggered DNA double-stranded break. Out of 16 Cpf1-family proteins, two enzymes from Acidaminococcus and Lachnospiraceae are shown to have efficient genome-editing activity in human cells. Cpf1 proteins are known in the art and have been described previously, for example Yamano et al., “Crystal structure of Cpf1 in complex with guide RNA and target DNA.” Cell (165) 2016, p. 949-962; the entire contents of which is hereby incorporated by reference.

[0129] Also useful in the present compositions and methods are nuclease-inactive Cpf1 (dCpf1) variants that may be used as a guide nucleotide sequence-programmable DNA-binding protein domain. The Cpf1 protein has a RuvC-like endonuclease domain that is similar to the RuvC domain of Cas9 but does not have a HNH endonuclease domain, and the N-terminal of Cpf1 does not have the alfa-helical recognition lobe of Cas9. It was shown in Zetsche et al., Cell, 163, 759-771, 2015 (which is incorporated herein by reference) that, the RuvC-like domain of Cpf1 is responsible for cleaving both DNA strands and inactivation of the RuvC-like domain inactivates Cpf1 nuclease activity. For example, mutations corresponding to D917A, E1006A, or D1255A in Francisella novicida Cpf1 (SEQ ID NO: 24) inactivates Cpf1 nuclease activity. In some embodiments, the dCpf1 of the present disclosure comprises mutations corresponding to D917A, E1006A, D1255A, D917A/E1006A, D917A/D1255A, E1006A/D1255A, or D917A/E1006A/D1255A in SEQ ID NO: 17. It is to be understood that any mutations, e.g., substitution mutations, deletions, or insertions that inactivate the RuvC domain of Cpf1, may be used in accordance with the present disclosure.

[0130] In some embodiments, the nucleic acid programmable DNA binding protein (napDNAbp) of any of the fusion proteins provided herein may be a Cpf1 protein. In some embodiments, the Cpf1 protein is a Cpf1 nickase (nCpf1). In some embodiments, the Cpf1 protein is a nuclease inactive Cpf1 (dCpf1). In some embodiments, the Cpf1, the nCpf1, or the dCpf1 comprises an amino acid sequence that is at least 85%, at least 90%, at least 91%, at least 92%, at least 93%, at least 94%, at least 95%, at least 96%, at least 97%, at least 98%, at least 99%, or at least 99.5% identical to any one of SEQ ID NOs: 17-24. In some embodiments, the dCpf1 comprises an amino acid sequence that is at least 85%, at least 90%, at least 91%, at least 92%, at least 93%, at least 94%, at least 95%, at least 96%, at least 97%, at least 98%, at least 99%, or at least 99.5% identical to any one of SEQ ID NOs: 17-24, and comprises mutations corresponding to D917A, E1006A, D1255A, D917A/E1006A, D917A/D1255A, E1006A/D1255A, or D917A/E1006A/D1255A in SEQ ID NO: 17. In some embodiments, the dCpf1 comprises an amino acid sequence of any one SEQ ID NOs: 17-24. It should be appreciated that Cpf1 from other bacterial species may also be used in accordance with the present disclosure.

Wild type Francisella novicida Cpf1 (SEQ ID NO: 17) (D917, E1006, and
D1255 are bolded and underlined)
(SEQ ID NO: 17)
MSIYQEFVNKYSLSKTLRFELIPQGKTLENIKARGLILDDEKRAKDYKKAKQII
DKYHQFFIEEILSSVCISEDLLQNYSDVYFKLKKSDDDNLQKDFKSAKDTIKKQISEYI
KDSEKFKNLFNQNLIDAKKGQESDLILWLKQSKDNGIELFKANSDITDIDEALEIIKSF
KGWTTYFKGFHENRKNVYSSNDIPTSIIYRIVDDNLPKFLENKAKYESLKDKAPEAIN
YEQIKKDLAEELTFDIDYKTSEVNQRVFSLDEVFEIANFNNYLNQSGITKENTIIGGKF
VNGENTKRKGINEYINLYSQQINDKTLKKYKMSVLFKQILSDTESKSFVIDKLEDDSD
VVTTMQSFYEQIAAFKTVEEKSIKETLSLLFDDLKAQKLDLSKIYFKNDKSLTDLSQQ
VFDDYSVIGTAVLEYITQQIAPKNLDNPSKKEQELIAKKTEKAKYLSLETIKLALEEFN
KHRDIDKQCRFEEILANFAAIPMIFDEIAQNKDNLAQISIKYQNQGKKDLLQASAEDD
VKAIKDLLDQTNNLLHKLKIFHISQSEDKANILDKDEHFYLVFEECYFELANIVPLYN
KIRNYITQKPYSDEKFKLNFENSTLANGWDKNKEPDNTAILFIKDDKYYLGVMNKK
NNKIFDDKAIKENKGEGYKKIVYKLLPGANKMLPKVFFSAKSIKFYNPSEDILRIRNH
STHTKNGSPQKGYEKFEFNIEDCRKFIDFYKQSISKHPEWKDFGFRFSDTQRYNSIDEF
YREVENQGYKLTFENISESYIDSVVNQGKLYLFQIYNKDFSAYSKGRPNLHTLYWKA
LFDERNLQDVVYKLNGEAELFYRKQSIPKKITHPAKEAIANKNKDNPKKESVFEYDLI
KDKRFTEDKFFFHCPITINFKSSGANKENDEINLLLKEKANDVHILSIDRGERHLAYYT
LVDGKGNIIKQDTFNIIGNDRMKTNYHDKLAAIEKDRDSARKDWKKINNIKEMKEG
YLSQVVHEIAKLVIEYNAIVVFEDLNFGFKRGRFKVEKQVYQKLEKMLIEKLNYLVF
KDNEFDKTGGVLRAYQLTAPFETFKKMGKQTGIIYYVPAGFTSKICPVTGFVNQLYP
KYESVSKSQEFFSKFDKICYNLDKGYFEFSFDYKNFGDKAAKGKWTIASFGSRLINFR
NSDKNHNWDTREVYPTKELEKLLKDYSIEYGHGECIKAAICGESDKKFFAKLTSVLN
TILQMRNSKTGTELDYLISPVADVNGNFFDSRQAPKNMPQDADANGAYHIGLKGLM
LLGRIKNNQEGKKLNLVIKNEEYFEFVQNRNN
Francisella novicida Cpf1 D917A (SEQ ID NO: 18) (A917, E1006, and
D1255 are bolded and underlined)
(SEQ ID NO: 18)
MSIYQEFVNKYSLSKTLRFELIPQGKTLENIKARGLILDDEKRAKDYKKAKQII
DKYHQFFIEEILSSVCISEDLLQNYSDVYFKLKKSDDDNLQKDFKSAKDTIKKQISEYI
KDSEKFKNLFNQNLIDAKKGQESDLILWLKQSKDNGIELFKANSDITDIDEALEIIKSF
KGWTTYFKGFHENRKNVYSSNDIPTSIIYRIVDDNLPKFLENKAKYESLKDKAPEAIN
YEQIKKDLAEELTFDIDYKTSEVNQRVFSLDEVFEIANFNNYLNQSGITKENTIIGGKF
VNGENTKRKGINEYINLYSQQINDKTLKKYKMSVLFKQILSDTESKSFVIDKLEDDSD
VVTTMQSFYEQIAAFKTVEEKSIKETLSLLFDDLKAQKLDLSKIYFKNDKSLTDLSQQ
VFDDYSVIGTAVLEYITQQIAPKNLDNPSKKEQELIAKKTEKAKYLSLETIKLALEEFN
KHRDIDKQCRFEEILANFAAIPMIFDEIAQNKDNLAQISIKYQNQGKKDLLQASAEDD
VKAIKDLLDQTNNLLHKLKIFHISQSEDKANILDKDEHFYLVFEECYFELANIVPLYN
KIRNYITQKPYSDEKFKLNFENSTLANGWDKNKEPDNTAILFIKDDKYYLGVMNKK
NNKIFDDKAIKENKGEGYKKIVYKLLPGANKMLPKVFFSAKSIKFYNPSEDILRIRNH
STHTKNGSPQKGYEKFEFNIEDCRKFIDFYKQSISKHPEWKDFGFRFSDTQRYNSIDEF
YREVENQGYKLTFENISESYIDSVVNQGKLYLFQIYNKDFSAYSKGRPNLHTLYWKA
LFDERNLQDVVYKLNGEAELFYRKQSIPKKITHPAKEAIANKNKDNPKKESVFEYDLI
KDKRFTEDKFFFHCPITINFKSSGANKENDEINLLLKEKANDVHILSIARGERHLAYYT
LVDGKGNIIKQDTFNIIGNDRMKTNYHDKLAAIEKDRDSARKDWKKINNIKEMKEG
YLSQVVHEIAKLVIEYNAIVVFEDLNFGFKRGRFKVEKQVYQKLEKMLIEKLNYLVF
KDNEFDKTGGVLRAYQLTAPFETFKKMGKQTGIIYYVPAGFTSKICPVTGFVNQLYP
KYESVSKSQEFFSKFDKICYNLDKGYFEFSFDYKNFGDKAAKGKWTIASFGSRLINFR
NSDKNHNWDTREVYPTKELEKLLKDYSIEYGHGECIKAAICGESDKKFFAKLTSVLN
TILQMRNSKTGTELDYLISPVADVNGNFFDSRQAPKNMPQDADANGAYHIGLKGLM
LLGRIKNNQEGKKLNLVIKNEEYFEFVQNRNN
Francisella novicida Cpf1 E1006A (SEQ ID NO: 19) (D917, A1006, and
D1255 are bolded and underlined)
(SEQ ID NO: 19)
MSIYQEFVNKYSLSKTLRFELIPQGKTLENIKARGLILDDEKRAKDYKKAKQII
DKYHQFFIEEILSSVCISEDLLQNYSDVYFKLKKSDDDNLQKDFKSAKDTIKKQISEYI
KDSEKFKNLFNQNLIDAKKGQESDLILWLKQSKDNGIELFKANSDITDIDEALEIIKSF
KGWTTYFKGFHENRKNVYSSNDIPTSIIYRIVDDNLPKFLENKAKYESLKDKAPEAIN
YEQIKKDLAEELTFDIDYKTSEVNQRVFSLDEVFEIANFNNYLNQSGITKENTIIGGKF
VNGENTKRKGINEYINLYSQQINDKTLKKYKMSVLFKQILSDTESKSFVIDKLEDDSD
VVTTMQSFYEQIAAFKTVEEKSIKETLSLLFDDLKAQKLDLSKIYFKNDKSLTDLSQQ
VFDDYSVIGTAVLEYITQQIAPKNLDNPSKKEQELIAKKTEKAKYLSLETIKLALEEFN
KHRDIDKQCRFEEILANFAAIPMIFDEIAQNKDNLAQISIKYQNQGKKDLLQASAEDD
VKAIKDLLDQTNNLLHKLKIFHISQSEDKANILDKDEHFYLVFEECYFELANIVPLYN
KIRNYITQKPYSDEKFKLNFENSTLANGWDKNKEPDNTAILFIKDDKYYLGVMNKK
NNKIFDDKAIKENKGEGYKKIVYKLLPGANKMLPKVFFSAKSIKFYNPSEDILRIRNH
STHTKNGSPQKGYEKFEFNIEDCRKFIDFYKQSISKHPEWKDFGFRFSDTQRYNSIDEF
YREVENQGYKLTFENISESYIDSVVNQGKLYLFQIYNKDFSAYSKGRPNLHTLYWKA
LFDERNLQDVVYKLNGEAELFYRKQSIPKKITHPAKEAIANKNKDNPKKESVFEYDLI
KDKRFTEDKFFFHCPITINFKSSGANKENDEINLLLKEKANDVHILSIDRGERHLAYYT
LVDGKGNIIKQDTFNIIGNDRMKTNYHDKLAAIEKDRDSARKDWKKINNIKEMKEG
YLSQVVHEIAKLVIEYNAIVVFADLNFGFKRGRFKVEKQVYQKLEKMLIEKLNYLVF
KDNEFDKTGGVLRAYQLTAPFETFKKMGKQTGIIYYVPAGFTSKICPVTGFVNQLYP
KYESVSKSQEFFSKFDKICYNLDKGYFEFSFDYKNFGDKAAKGKWTIASFGSRLINFR
NSDKNHNWDTREVYPTKELEKLLKDYSIEYGHGECIKAAICGESDKKFFAKLTSVLN
TILQMRNSKTGTELDYLISPVADVNGNFFDSRQAPKNMPQDADANGAYHIGLKGLM
LLGRIKNNQEGKKLNLVIKNEEYFEFVQNRNN
Francisella novicida Cpf1 D1255A (SEQ ID NO: 20) (D917, E1006, and
A1255 are bolded and underlined)
(SEQ ID NO: 20)
MSIYQEFVNKYSLSKTLRFELIPQGKTLENIKARGLILDDEKRAKDYKKAKQII
DKYHQFFIEEILSSVCISEDLLQNYSDVYFKLKKSDDDNLQKDFKSAKDTIKKQISEYI
KDSEKFKNLFNQNLIDAKKGQESDLILWLKQSKDNGIELFKANSDITDIDEALEIIKSF
KGWTTYFKGFHENRKNVYSSNDIPTSIIYRIVDDNLPKFLENKAKYESLKDKAPEAIN
YEQIKKDLAEELTFDIDYKTSEVNQRVFSLDEVFEIANFNNYLNQSGITKENTIIGGKF
VNGENTKRKGINEYINLYSQQINDKTLKKYKMSVLFKQILSDTESKSFVIDKLEDDSD
VVTTMQSFYEQIAAFKTVEEKSIKETLSLLFDDLKAQKLDLSKIYFKNDKSLTDLSQQ
VFDDYSVIGTAVLEYITQQIAPKNLDNPSKKEQELIAKKTEKAKYLSLETIKLALEEFN
KHRDIDKQCRFEEILANFAAIPMIFDEIAQNKDNLAQISIKYQNQGKKDLLQASAEDD
VKAIKDLLDQTNNLLHKLKIFHISQSEDKANILDKDEHFYLVFEECYFELANIVPLYN
KIRNYITQKPYSDEKFKLNFENSTLANGWDKNKEPDNTAILFIKDDKYYLGVMNKK
NNKIFDDKAIKENKGEGYKKIVYKLLPGANKMLPKVFFSAKSIKFYNPSEDILRIRNH
STHTKNGSPQKGYEKFEFNIEDCRKFIDFYKQSISKHPEWKDFGFRFSDTQRYNSIDEF
YREVENQGYKLTFENISESYIDSVVNQGKLYLFQIYNKDFSAYSKGRPNLHTLYWKA
LFDERNLQDVVYKLNGEAELFYRKQSIPKKITHPAKEAIANKNKDNPKKESVFEYDLI
KDKRFTEDKFFFHCPITINFKSSGANKENDEINLLLKEKANDVHILSIDRGERHLAYYT
LVDGKGNIIKQDTFNIIGNDRMKTNYHDKLAAIEKDRDSARKDWKKINNIKEMKEG
YLSQVVHEIAKLVIEYNAIVVFEDLNFGFKRGRFKVEKQVYQKLEKMLIEKLNYLVF
KDNEFDKTGGVLRAYQLTAPFETFKKMGKQTGIIYYVPAGFTSKICPVTGFVNQLYP
KYESVSKSQEFFSKFDKICYNLDKGYFEFSFDYKNFGDKAAKGKWTIASFGSRLINFR
NSDKNHNWDTREVYPTKELEKLLKDYSIEYGHGECIKAAICGESDKKFFAKLTSVLN
TILQMRNSKTGTELDYLISPVADVNGNFFDSRQAPKNMPQDAAANGAYHIGLKGLM
LLGRIKNNQEGKKLNLVIKNEEYFEFVQNRNN
Francisella novicida Cpf1 D917A/E1006A (SEQ ID NO: 21) (A917, A1006,
and D1255 are bolded and underlined)
(SEQ ID NO: 21)
MSIYQEFVNKYSLSKTLRFELIPQGKTLENIKARGLILDDEKRAKDYKKAKQII
DKYHQFFIEEILSSVCISEDLLQNYSDVYFKLKKSDDDNLQKDFKSAKDTIKKQISEYI
KDSEKFKNLFNQNLIDAKKGQESDLILWLKQSKDNGIELFKANSDITDIDEALEIIKSF
KGWTTYFKGFHENRKNVYSSNDIPTSIIYRIVDDNLPKFLENKAKYESLKDKAPEAIN
YEQIKKDLAEELTFDIDYKTSEVNQRVFSLDEVFEIANFNNYLNQSGITKENTIIGGKF
VNGENTKRKGINEYINLYSQQINDKTLKKYKMSVLFKQILSDTESKSFVIDKLEDDSD
VVTTMQSFYEQIAAFKTVEEKSIKETLSLLFDDLKAQKLDLSKIYFKNDKSLTDLSQQ
VFDDYSVIGTAVLEYITQQIAPKNLDNPSKKEQELIAKKTEKAKYLSLETIKLALEEFN
KHRDIDKQCRFEEILANFAAIPMIFDEIAQNKDNLAQISIKYQNQGKKDLLQASAEDD
VKAIKDLLDQTNNLLHKLKIFHISQSEDKANILDKDEHFYLVFEECYFELANIVPLYN
KIRNYITQKPYSDEKFKLNFENSTLANGWDKNKEPDNTAILFIKDDKYYLGVMNKK
NNKIFDDKAIKENKGEGYKKIVYKLLPGANKMLPKVFFSAKSIKFYNPSEDILRIRNH
STHTKNGSPQKGYEKFEFNIEDCRKFIDFYKQSISKHPEWKDFGFRFSDTQRYNSIDEF
YREVENQGYKLTFENISESYIDSVVNQGKLYLFQIYNKDFSAYSKGRPNLHTLYWKA
LFDERNLQDVVYKLNGEAELFYRKQSIPKKITHPAKEAIANKNKDNPKKESVFEYDLI
KDKRFTEDKFFFHCPITINFKSSGANKENDEINLLLKEKANDVHILSIARGERHLAYYT
LVDGKGNIIKQDTFNIIGNDRMKTNYHDKLAAIEKDRDSARKDWKKINNIKEMKEG
YLSQVVHEIAKLVIEYNAIVVFADLNFGFKRGRFKVEKQVYQKLEKMLIEKLNYLVF
KDNEFDKTGGVLRAYQLTAPFETFKKMGKQTGIIYYVPAGFTSKICPVTGFVNQLYP
KYESVSKSQEFFSKFDKICYNLDKGYFEFSFDYKNFGDKAAKGKWTIASFGSRLINFR
NSDKNHNWDTREVYPTKELEKLLKDYSIEYGHGECIKAAICGESDKKFFAKLTSVLN
TILQMRNSKTGTELDYLISPVADVNGNFFDSRQAPKNMPQDADANGAYHIGLKGLM
LLGRIKNNQEGKKLNLVIKNEEYFEFVQNRNN
Francisella novicida Cpf1 D917A/D1255A (SEQ ID NO: 22) (A917, E1006,
and A1255 are bolded and underlined)
(SEQ ID NO: 22)
MSIYQEFVNKYSLSKTLRFELIPQGKTLENIKARGLILDDEKRAKDYKKAKQII
DKYHQFFIEEILSSVCISEDLLQNYSDVYFKLKKSDDDNLQKDFKSAKDTIKKQISEYI
KDSEKFKNLFNQNLIDAKKGQESDLILWLKQSKDNGIELFKANSDITDIDEALEIIKSF
KGWTTYFKGFHENRKNVYSSNDIPTSIIYRIVDDNLPKFLENKAKYESLKDKAPEAIN
YEQIKKDLAEELTFDIDYKTSEVNQRVESLDEVFEIANFNNYLNQSGITKENTIIGGKF
VNGENTKRKGINEYINLYSQQINDKTLKKYKMSVLFKQILSDTESKSFVIDKLEDDSD
VVTTMQSFYEQIAAFKTVEEKSIKETLSLLFDDLKAQKLDLSKIYFKNDKSLTDLSQQ
VFDDYSVIGTAVLEYITQQIAPKNLDNPSKKEQELIAKKTEKAKYLSLETIKLALEEFN
KHRDIDKQCRFEEILANFAAIPMIFDEIAQNKDNLAQISIKYQNQGKKDLLQASAEDD
VKAIKDLLDQTNNLLHKLKIFHISQSEDKANILDKDEHFYLVFEECYFELANIVPLYN
KIRNYITQKPYSDEKFKLNFENSTLANGWDKNKEPDNTAILFIKDDKYYLGVMNKK
NNKIFDDKAIKENKGEGYKKIVYKLLPGANKMLPKVFFSAKSIKFYNPSEDILRIRNH
STHTKNGSPQKGYEKFEFNIEDCRKFIDFYKQSISKHPEWKDFGFRFSDTQRYNSIDEF
YREVENQGYKLTFENISESYIDSVVNQGKLYLFQIYNKDFSAYSKGRPNLHTLYWKA
LFDERNLQDVVYKLNGEAELFYRKQSIPKKITHPAKEAIANKNKDNPKKESVFEYDLI
KDKRFTEDKFFFHCPITINFKSSGANKENDEINLLLKEKANDVHILSIARGERHLAYYT
LVDGKGNIIKQDTFNIIGNDRMKTNYHDKLAAIEKDRDSARKDWKKINNIKEMKEG
YLSQVVHEIAKLVIEYNAIVVFEDLNFGFKRGRFKVEKQVYQKLEKMLIEKLNYLVF
KDNEFDKTGGVLRAYQLTAPFETFKKMGKQTGIIYYVPAGFTSKICPVTGFVNQLYP
KYESVSKSQEFFSKFDKICYNLDKGYFEFSFDYKNFGDKAAKGKWTIASFGSRLINFR
NSDKNHNWDTREVYPTKELEKLLKDYSIEYGHGECIKAAICGESDKKFFAKLTSVLN
TILQMRNSKTGTELDYLISPVADVNGNFFDSRQAPKNMPQDAAANGAYHIGLKGLM
LLGRIKNNQEGKKLNLVIKNEEYFEFVQNRNN
Francisella novicida Cpf1 E1006A/D1255A (SEQ ID NO: 23) (D917, A1006,
and A1255 are bolded and underlined)
(SEQ ID NO: 23)
MSIYQEFVNKYSLSKTLRFELIPQGKTLENIKARGLILDDEKRAKDYKKAKQII
DKYHQFFIEEILSSVCISEDLLQNYSDVYFKLKKSDDDNLQKDFKSAKDTIKKQISEYI
KDSEKFKNLFNQNLIDAKKGQESDLILWLKQSKDNGIELFKANSDITDIDEALEIIKSF
KGWTTYFKGFHENRKNVYSSNDIPTSIIYRIVDDNLPKFLENKAKYESLKDKAPEAIN
YEQIKKDLAEELTFDIDYKTSEVNQRVESLDEVFEIANFNNYLNQSGITKENTIIGGKF
VNGENTKRKGINEYINLYSQQINDKTLKKYKMSVLFKQILSDTESKSFVIDKLEDDSD
VVTTMQSFYEQIAAFKTVEEKSIKETLSLLFDDLKAQKLDLSKIYFKNDKSLTDLSQQ
VFDDYSVIGTAVLEYITQQIAPKNLDNPSKKEQELIAKKTEKAKYLSLETIKLALEEFN
KHRDIDKQCRFEEILANFAAIPMIFDEIAQNKDNLAQISIKYQNQGKKDLLQASAEDD
VKAIKDLLDQTNNLLHKLKIFHISQSEDKANILDKDEHFYLVFEECYFELANIVPLYN
KIRNYITQKPYSDEKFKLNFENSTLANGWDKNKEPDNTAILFIKDDKYYLGVMNKK
NNKIFDDKAIKENKGEGYKKIVYKLLPGANKMLPKVFFSAKSIKFYNPSEDILRIRNH
STHTKNGSPQKGYEKFEFNIEDCRKFIDFYKQSISKHPEWKDFGFRFSDTQRYNSIDEF
YREVENQGYKLTFENISESYIDSVVNQGKLYLFQIYNKDFSAYSKGRPNLHTLYWKA
LFDERNLQDVVYKLNGEAELFYRKQSIPKKITHPAKEAIANKNKDNPKKESVFEYDLI
KDKRFTEDKFFFHCPITINFKSSGANKENDEINLLLKEKANDVHILSIDRGERHLAYYT
LVDGKGNIIKQDTFNIIGNDRMKTNYHDKLAAIEKDRDSARKDWKKINNIKEMKEG
YLSQVVHEIAKLVIEYNAIVVFADLNFGFKRGRFKVEKQVYQKLEKMLIEKLNYLVF
KDNEFDKTGGVLRAYQLTAPFETFKKMGKQTGIIYYVPAGFTSKICPVTGFVNQLYP
KYESVSKSQEFFSKFDKICYNLDKGYFEFSFDYKNFGDKAAKGKWTIASFGSRLINFR
NSDKNHNWDTREVYPTKELEKLLKDYSIEYGHGECIKAAICGESDKKFFAKLTSVLN
TILQMRNSKTGTELDYLISPVADVNGNFFDSRQAPKNMPQDAAANGAYHIGLKGLM
LLGRIKNNQEGKKLNLVIKNEEYFEFVQNRNN
Francisella novicida Cpf1 D917A/E1006A/D1255A (SEQ ID NO: 24) (A917,
A1006, and A1255 are bolded and underlined)
(SEQ ID NO: 24)
MSIYQEFVNKYSLSKTLRFELIPQGKTLENIKARGLILDDEKRAKDYKKAKQII
DKYHQFFIEEILSSVCISEDLLQNYSDVYFKLKKSDDDNLQKDFKSAKDTIKKQISEYI
KDSEKFKNLFNQNLIDAKKGQESDLILWLKQSKDNGIELFKANSDITDIDEALEIIKSF
KGWTTYFKGFHENRKNVYSSNDIPTSIIYRIVDDNLPKFLENKAKYESLKDKAPEAIN
YEQIKKDLAEELTFDIDYKTSEVNQRVFSLDEVFEIANFNNYLNQSGITKENTIIGGKF
VNGENTKRKGINEYINLYSQQINDKTLKKYKMSVLFKQILSDTESKSFVIDKLEDDSD
VVTTMQSFYEQIAAFKTVEEKSIKETLSLLFDDLKAQKLDLSKIYFKNDKSLTDLSQQ
VFDDYSVIGTAVLEYITQQIAPKNLDNPSKKEQELIAKKTEKAKYLSLETIKLALEEFN
KHRDIDKQCRFEEILANFAAIPMIFDEIAQNKDNLAQISIKYQNQGKKDLLQASAEDD
VKAIKDLLDQTNNLLHKLKIFHISQSEDKANILDKDEHFYLVFEECYFELANIVPLYN
KIRNYITQKPYSDEKFKLNFENSTLANGWDKNKEPDNTAILFIKDDKYYLGVMNKK
NNKIFDDKAIKENKGEGYKKIVYKLLPGANKMLPKVFFSAKSIKFYNPSEDILRIRNH
STHTKNGSPQKGYEKFEFNIEDCRKFIDFYKQSISKHPEWKDFGFRFSDTQRYNSIDEF
YREVENQGYKLTFENISESYIDSVVNQGKLYLFQIYNKDFSAYSKGRPNLHTLYWKA
LFDERNLQDVVYKLNGEAELFYRKQSIPKKITHPAKEAIANKNKDNPKKESVFEYDLI
KDKRFTEDKFFFHCPITINFKSSGANKENDEINLLLKEKANDVHILSIARGERHLAYYT
LVDGKGNIIKQDTFNIIGNDRMKTNYHDKLAAIEKDRDSARKDWKKINNIKEMKEG
YLSQVVHEIAKLVIEYNAIVVFADLNFGFKRGRFKVEKQVYQKLEKMLIEKLNYLVF
KDNEFDKTGGVLRAYQLTAPFETFKKMGKQTGIIYYVPAGFTSKICPVTGFVNQLYP
KYESVSKSQEFFSKFDKICYNLDKGYFEFSFDYKNFGDKAAKGKWTIASFGSRLINFR
NSDKNHNWDTREVYPTKELEKLLKDYSIEYGHGECIKAAICGESDKKFFAKLTSVLN
TILQMRNSKTGTELDYLISPVADVNGNFFDSRQAPKNMPQDAAANGAYHIGLKGLM
LLGRIKNNQEGKKLNLVIKNEEYFEFVQNRNN

[0131] In some embodiments, the nucleic acid programmable DNA binding protein (napDNAbp) is a nucleic acid programmable DNA binding protein that does not require a canonical (NGG) PAM sequence. In some embodiments, the napDNAbp is an argonaute protein. One example of such a nucleic acid programmable DNA binding protein is an Argonaute protein from Natronobacterium gregoryi (NgAgo). NgAgo is a ssDNA-guided endonuclease. NgAgo binds 5′ phosphorylated ssDNA of ˜24 nucleotides (gDNA) to guide it to its target site and will make DNA double-strand breaks at the gDNA site. In contrast to Cas9, the NgAgo-gDNA system does not require a protospacer-adjacent motif (PAM). Using a nuclease inactive NgAgo (dNgAgo) can greatly expand the bases that may be targeted. The characterization and use of NgAgo have been described in Gao et al., Nat Biotechnol., 2016 July; 34(7):768-73. PubMed PMID: 27136078; Swarts et al., Nature. 507(7491) (2014):258-61; and Swarts et al., Nucleic Acids Res. 43(10) (2015):5120-9, each of which is incorporated herein by reference. The sequence of Natronobacterium gregoryi Argonaute is provided in SEQ ID NO: 25.

Wild type Natronobacterium gregoryi Argonaute (SEQ ID NO: 25)
(SEQ ID NO: 25)
MTVIDLDSTTTADELTSGHTYDISVTLTGVYDNTDEQHPRMSLAFEQDNGER
RYITLWKNTTPKDVFTYDYATGSTYIFTNIDYEVKDGYENLTATYQTTVENATAQEV
GTTDEDETFAGGEPLDHHLDDALNETPDDAETESDSGHVMTSFASRDQLPEWTLHT
YTLTATDGAKTDTEYARRTLAYTVRQELYTDHDAAPVATDGLMLLTPEPLGETPLD
LDCGVRVEADETRTLDYTTAKDRLLARELVEEGLKRSLWDDYLVRGIDEVLSKEPV
LTCDEFDLHERYDLSVEVGHSGRAYLHINFRHRFVPKLTLADIDDDNIYPGLRVKTT
YRPRRGHIVWGLRDECATDSLNTLGNQSVVAYHRNNQTPINTDLLDAIEAADRRVV
ETRRQGHGDDAVSFPQELLAVEPNTHQIKQFASDGFHQQARSKTRLSASRCSEKAQA
FAERLDPVRLNGSTVEFSSEFFTGNNEQQLRLLYENGESVLTFRDGARGAHPDETFSK
GIVNPPESFEVAVVLPEQQADTCKAQWDTMADLLNQAGAPPTRSETVQYDAFSSPES
ISLNVAGAIDPSEVDAAFVVLPPDQEGFADLASPTETYDELKKALANMGIYSQMAYF
DRFRDAKIFYTRNVALGLLAAAGGVAFTTEHAMPGDADMFIGIDVSRSYPEDGASG
QINIAATATAVYKDGTILGHSSTRPQLGEKLQSTDVRDIMKNAILGYQQVTGESPTHI
VIHRDGFMNEDLDPATEFLNEQGVEYDIVEIRKQPQTRLLAVSDVQYDTPVKSIAAIN
QNEPRATVATFGAPEYLATRDGGGLPRPIQIERVAGETDIETLTRQVYLLSQSHIQVH
NSTARLPITTAYADQASTHATKGYLVQTGAFESNVGFL

[0132] In some embodiments, the napDNAbp is a prokaryotic homolog of an Argonaute protein. Prokaryotic homologs of Argonaute proteins are known and have been described, for example, in Makarova K., et al., “Prokaryotic homologs of Argonaute proteins are predicted to function as key components of a novel system of defense against mobile genetic elements”, Biol Direct. 2009 Aug. 25; 4:29. doi: 10.1186/1745-6150-4-29, the entire contents of which is hereby incorporated by reference. In some embodiments, the napDNAbp is a Marinitoga piezophila Argunaute (MpAgo) protein. The CRISPR-associated Marinitoga piezophila Argunaute (MpAgo) protein cleaves single-stranded target sequences using 5′-phosphorylated guides. The 5′ guides are used by all known Argonautes. The crystal structure of an MpAgo-RNA complex shows a guide strand binding site comprising residues that block 5′ phosphate interactions. This data suggests the evolution of an Argonaute subclass with noncanonical specificity for a 5′-hydroxylated guide. See, e.g., Kaya et al., “A bacterial Argonaute with noncanonical guide RNA specificity”, Proc Natl Acad Sci USA. 2016 Apr. 12; 113(15):4057-62, the entire contents of which are hereby incorporated by reference). It should be appreciated that other argonaute proteins may be used, and are within the scope of this disclosure.

[0133] In some embodiments, the nucleic acid programmable DNA binding protein (napDNAbp) is a single effector of a microbial CRISPR-Cas system. Single effectors of microbial CRISPR-Cas systems include, without limitation, Cas9, Cpf1, C2c1, C2c2, and C2c3. Typically, microbial CRISPR-Cas systems are divided into Class 1 and Class 2 systems. Class 1 systems have multisubunit effector complexes, while Class 2 systems have a single protein effector. For example, Cas9 and Cpf1 are Class 2 effectors. In addition to Cas9 and Cpf1, three distinct Class 2 CRISPR-Cas systems (C2c1, C2c2, and C2c3) have been described by Shmakov et al., “Discovery and Functional Characterization of Diverse Class 2 CRISPR Cas Systems”, Mol. Cell, 2015 Nov. 5; 60(3): 385-397, the entire contents of which is hereby incorporated by reference. Effectors of two of the systems, C2c1 and C2c3, contain RuvC-like endonuclease domains related to Cpf1. A third system, C2c2 contains an effector with two predicated HEPN RNase domains. Production of mature CRISPR RNA is tracrRNA-independent, unlike production of CRISPR RNA by C2c1. C2c1 depends on both CRISPR RNA and tracrRNA for DNA cleavage. Bacterial C2c2 has been shown to possess a unique RNase activity for CRISPR RNA maturation distinct from its RNA-activated single-stranded RNA degradation activity. These RNase functions are different from each other and from the CRISPR RNA-processing behavior of Cpf1. See, e.g., East-Seletsky, et al., “Two distinct RNase activities of CRISPR-C2c2 enable guide-RNA processing and RNA detection”, Nature, 2016 Oct. 13; 538(7624):270-273, the entire contents of which are hereby incorporated by reference. In vitro biochemical analysis of C2c2 in Leptotrichia shahii has shown that C2c2 is guided by a single CRISPR RNA and can be programed to cleave ssRNA targets carrying complementary protospacers. Catalytic residues in the two conserved HEPN domains mediate cleavage. Mutations in the catalytic residues generate catalytically inactive RNA-binding proteins. See e.g., Abudayyeh et al., “C2c2 is a single-component programmable RNA-guided RNA-targeting CRISPR effector”, Science, 2016 Aug. 5; 353(6299), the entire contents of which are hereby incorporated by reference.

[0134] The crystal structure of Alicyclobaccillus acidoterrastris C2c1 (AacC2c1) has been reported in complex with a chimeric single-molecule guide RNA (sgRNA). See e.g., Liu et al., “C2c1-sgRNA Complex Structure Reveals RNA-Guided DNA Cleavage Mechanism”, Mol. Cell, 2017 Jan. 19; 65(2):310-322, the entire contents of which are hereby incorporated by reference. The crystal structure has also been reported in Alicyclobacillus acidoterrestris C2c1 bound to target DNAs as ternary complexes. See e.g., Yang et al., “PAM-dependent Target DNA Recognition and Cleavage by C2C1 CRISPR-Cas endonuclease”, Cell, 2016 Dec. 15; 167(7):1814-1828, the entire contents of which are hereby incorporated by reference. Catalytically competent conformations of AacC2c1, both with target and non-target DNA strands, have been captured independently positioned within a single RuvC catalytic pocket, with C2c1-mediated cleavage resulting in a staggered seven-nucleotide break of target DNA. Structural comparisons between C2c1 ternary complexes and previously identified Cas9 and Cpf1 counterparts demonstrate the diversity of mechanisms used by CRISPR-Cas9 systems.

[0135] In some embodiments, the nucleic acid programmable DNA binding protein (napDNAbp) of any of the fusion proteins provided herein may be a C2c1, a C2c2, or a C2c3 protein. In some embodiments, the napDNAbp is a C2c1 protein. In some embodiments, the napDNAbp is a C2c2 protein. In some embodiments, the napDNAbp is a C2c3 protein. In some embodiments, the napDNAbp comprises an amino acid sequence that is at least 85%, at least 90%, at least 91%, at least 92%, at least 93%, at least 94%, at least 95%, at least 96%, at least 97%, at least 98%, at least 99%, or at least 99.5% identical to a naturally-occurring C2c1, C2c2, or C2c3 protein. In some embodiments, the napDNAbp is a naturally-occurring C2c1, C2c2, or C2c3 protein. In some embodiments, the napDNAbp comprises an amino acid sequence that is at least 85%, at least 90%, at least 91%, at least 92%, at least 93%, at least 94%, at least 95%, at least 96%, at least 97%, at least 98%, at least 99%, or at least 99.5% identical to any one of SEQ ID NOs: 26 or 27. In some embodiments, the napDNAbp comprises an amino acid sequence of any one SEQ ID NOs: 26 or 27. It should be appreciated that C2c1, C2c2, or C2c3 from other bacterial species may also be used in accordance with the present disclosure.

C2c1 (uniprot.org/uniprot/T0D7A2#)
sp|T0D7A2|C2C1_ALIAG CRISPR-associated endonuclease C2c1
OS = Alicyclobacillus acidoterrestris (strain ATCC 49025/DSM 3922/CIP 106132/
NCIMB 13137/GD3B) GN = c2c1 PE = 1 SV = 1
(SEQ ID NO: 26)
MAVKSIKVKLRLDDMPEIRAGLWKLHKEVNAGVRYYTEWLSLLRQENLYRR
SPNGDGEQECDKTAEECKAELLERLRARQVENGHRGPAGSDDELLQLARQLYELLV
PQAIGAKGDAQQIARKFLSPLADKDAVGGLGIAKAGNKPRWVRMREAGEPGWEEE
KEKAETRKSADRTADVLRALADFGLKPLMRVYTDSEMSSVEWKPLRKGQAVRTWD
RDMFQQAIERMMSWESWNQRVGQEYAKLVEQKNRFEQKNFVGQEHLVHLVNQLQ
QDMKEASPGLESKEQTAHYVTGRALRGSDKVFEKWGKLAPDAPFDLYDAEIKNVQ
RRNTRRFGSHDLFAKLAEPEYQALWREDASFLTRYAVYNSILRKLNHAKMFATFTLP
DATAHPIWTRFDKLGGNLHQYTFLFNEFGERRHAIRFHKLLKVENGVAREVDDVTV
PISMSEQLDNLLPRDPNEPIALYFRDYGAEQHFTGEFGGAKIQCRRDQLAHMHRRRG
ARDVYLNVSVRVQSQSEARGERRPPYAAVFRLVGDNHRAFVHFDKLSDYLAEHPD
DGKLGSEGLLSGLRVMSVDLGLRTSASISVFRVARKDELKPNSKGRVPFFFPIKGNDN
LVAVHERSQLLKLPGETESKDLRAIREERQRTLRQLRTQLAYLRLLVRCGSEDVGRR
ERSWAKLIEQPVDAANHMTPDWREAFENELQKLKSLHGICSDKEWMDAVYESVRR
VWRHMGKQVRDWRKDVRSGERPKIRGYAKDVVGGNSIEQIEYLERQYKFLKSWSF
FGKVSGQVIRAEKGSRFAITLREHIDHAKEDRLKKLADRIIMEALGYVYALDERGKG
KWVAKYPPCQLILLEELSEYQFNNDRPPSENNQLMQWSHRGVFQELINQAQVHDLL
VGTMYAAFSSRFDARTGAPGIRCRRVPARCTQEHNPEPFPWWLNKFVVEHTLDACP
LRADDLIPTGEGEIFVSPFSAEEGDFHQIHADLNAAQNLQQRLWSDFDISQIRLRCDW
GEVDGELVLIPRLTGKRTADSYSNKVFYTNTGVTYYERERGKKRRKVFAQEKLSEEE
AELLVEADEAREKSVVLMRDPSGIINRGNWTRQKEFWSMVNQRIEGYLVKQIRSRVP
LQDSACENTGDI
C2c2 (uniprot.org/uniprot/P0DOC6)
>sp|P0DOC6|C2C2_LEPSD CRISPR-associated endoribonuclease C2c2
OS = Leptotrichia shahii (strain DSM 19757/CCUG 47503/CIP 107916/JCM 16776/
LB37) GN = c2c2 PE = 1 SV = 1
(SEQ ID NO: 27)
MGNLFGHKRWYEVRDKKDFKIKRKVKVKRNYDGNKYILNINENNNKEKIDN
NKFIRKYINYKKNDNILKEFTRKFHAGNILFKLKGKEGIIRIENNDDFLETEEVVLYIE
AYGKSEKLKALGITKKKIIDEAIRQGITKDDKKIEIKRQENEEEIEIDIRDEYTNKTLND
CSIILRIIENDELETKKSIYEIFKNINMSLYKIIEKIIENETEKVFENRYYEEHLREKLLKD
DKIDVILTNFMEIREKIKSNLEILGFVKFYLNVGGDKKKSKNKKMLVEKILNINVDLT
VEDIADFVIKELEFWNITKRIEKVKKVNNEFLEKRRNRTYIKSYVLLDKHEKFKIERE
NKKDKIVKFFVENIKNNSIKEKIEKILAEFKIDELIKKLEKELKKGNCDTEIFGIFKKHY
KVNFDSKKFSKKSDEEKELYKIIYRYLKGRIEKILVNEQKVRLKKMEKIEIEKILNESIL
SEKILKRVKQYTLEHIMYLGKLRHNDIDMTTVNTDDFSRLHAKEELDLELITFFASTN
MELNKIFSRENINNDENIDFFGGDREKNYVLDKKILNSKIKIIRDLDFIDNKNNITNNFI
RKFTKIGTNERNRILHAISKERDLQGTQDDYNKVINIIQNLKISDEEVSKALNLDVVFK
DKKNIITKINDIKISEENNNDIKYLPSFSKVLPEILNLYRNNPKNEPFDTIETEKIVLNAL
IYVNKELYKKLILEDDLEENESKNIFLQELKKTLGNIDEIDENIIENYYKNAQISASKG
NNKAIKKYQKKVIECYIGYLRKNYEELFDFSDFKMNIQEIKKQIKDINDNKTYERITV
KTSDKTIVINDDFEYIISIFALLNSNAVINKIRNRFFATSVWLNTSEYQNIIDILDEIMQL
NTLRNECITENWNLNLEEFIQKMKEIEKDFDDFKIQTKKEIFNNYYEDIKNNILTEFKD
DINGCDVLEKKLEKIVIFDDETKFEIDKKSNILQDEQRKLSNINKKDLKKKVDQYIKD
KDQEIKSKILCRIIFNSDFLKKYKKEIDNLIEDMESENENKFQEIYYPKERKNELYIYKK
NLFLNIGNPNFDKIYGLISNDIKMADAKFLFNIDGKNIRKNKISEIDAILKNLNDKLNG
YSKEYKEKYIKKLKENDDFFAKNIQNKNYKSFEKDYNRVSEYKKIRDLVEFNYLNKI
ESYLIDINWKLAIQMARFERDMHYIVNGLRELGIIKLSGYNTGISRAYPKRNGSDGFY
TTTAYYKFFDEESYKKFEKICYGFGIDLSENSEINKPENESIRNYISHFYIVRNPFADYS
IAEQIDRVSNLLSYSTRYNNSTYASVFEVFKKDVNLDYDELKKKFKLIGNNDILERLM
KPKKVSVLELESYNSDYIKNLIIELLTKIENTNDTL

Cas9 Domains with Reduced PAM Exclusivity

[0136] Some aspects of the disclosure provide Cas9 domains that have different PAM specificities. Typically, Cas9 proteins, such as Cas9 from S. pyogenes (spCas9), require a canonical NGG PAM sequence to bind a particular nucleic acid region. This may limit the ability to edit desired bases within a genome. In some embodiments, the base editing fusion proteins provided herein may need to be placed at a precise location, for example where a target base is placed within a 4 base region (e.g., a “deamination window”), which is approximately 15 bases upstream of the PAM. See Komor, A. C., et al., “Programmable editing of a target base in genomic DNA without double-stranded DNA cleavage” Nature 533, 420-424 (2016), the entire contents of which are hereby incorporated by reference. Accordingly, in some embodiments, any of the fusion proteins provided herein may contain a Cas9 domain that is capable of binding a nucleotide sequence that does not contain a canonical (e.g., NGG) PAM sequence. Cas9 domains that bind to non-canonical PAM sequences have been described in the art and would be apparent to the skilled artisan. For example, Cas9 domains that bind non-canonical PAM sequences have been described in Kleinstiver, B. P., et al., “Engineered CRISPR-Cas9 nucleases with altered PAM specificities” Nature 523, 481-485 (2015); and Kleinstiver, B. P., et al., “Broadening the targeting range of Staphylococcus aureus CRISPR-Cas9 by modifying PAM recognition” Nature Biotechnology 33, 1293-1298 (2015); the entire contents of each are hereby incorporated by reference.

[0137] In some embodiments, the Cas9 domain is a Cas9 domain from Staphylococcus aureus (SaCas9). In some embodiments, the SaCas9 domain is a nuclease active SaCas9, a nuclease inactive SaCas9 (SaCas9d), or a SaCas9 nickase (SaCas9n). In some embodiments, the SaCas9 comprises the amino acid sequence SEQ ID NO: 28. In some embodiments, the SaCas9 comprises a N579X mutation of SEQ ID NO: 28, wherein X is any amino acid except for N. In some embodiments, the SaCas9 comprises a N579A mutation of SEQ ID NO: 28. In some embodiments, the SaCas9 domain, the SaCas9d domain, or the SaCas9n domain can bind to a nucleic acid sequence having a non-canonical PAM. In some embodiments, the SaCas9 domain, the SaCas9d domain, or the SaCas9n domain can bind to a nucleic acid sequence having a NNGRRT PAM sequence. In some embodiments, the SaCas9 domain comprises one or more of a E781X, a N967X, and a R1014X mutation of SEQ ID NO: 28, wherein X is any amino acid. In some embodiments, the SaCas9 domain comprises one or more of a E781K, a N967K, and a R1014H mutation of SEQ ID NO: 28. In some embodiments, the SaCas9 domain comprises a E781K, a N967K, or a R1014H mutation of SEQ ID NO: 28.

[0138] In some embodiments, the Cas9 domain of any of the fusion proteins provided herein comprises an amino acid sequence that is at least 60%, at least 65%, at least 70%, at least 75%, at least 80%, at least 85%, at least 90%, at least 95%, at least 96%, at least 97%, at least 98%, at least 99%, or at least 99.5% identical to SEQ ID NO: 28. In some embodiments, the Cas9 domain of any of the fusion proteins provided herein comprises the amino acid sequence of SEQ ID NO: 28. In some embodiments, the Cas9 domain of any of the fusion proteins provided herein consists of the amino acid sequence of SEQ ID NO: 28.

### Exemplary SaCas9 Sequence

(SEQ ID NO: 28)
KRNYILGLDIGITSVGYGIIDYETRDVIDAGVRLFKEANVENNEGRRSKRGAR
RLKRRRRHRIQRVKKLLFDYNLLTDHSELSGINPYEARVKGLSQKLSEEEFSAALLHL
AKRRGVHNVNEVEEDTGNELSTKEQISRNSKALEEKYVAELQLERLKKDGEVRGSIN
RFKTSDYVKEAKQLLKVQKAYHQLDQSFIDTYIDLLETRRTYYEGPGEGSPFGWKDI
KEWYEMLMGHCTYFPEELRSVKYAYNADLYNALNDLNNLVITRDENEKLEYYEKF
QIIENVFKQKKKPTLKQIAKEILVNEEDIKGYRVTSTGKPEFTNLKVYHDIKDITARKE
IIENAELLDQIAKILTIYQSSEDIQEELTNLNSELTQEEIEQISNLKGYTGTHNLSLKAIN
LILDELWHTNDNQIAIFNRLKLVPKKVDLSQQKEIPTTLVDDFILSPVVKRSFIQSIKVI
NAIIKKYGLPNDIIIELAREKNSKDAQKMINEMQKRNRQTNERIEEIIRTTGKENAKYL
IEKIKLHDMQEGKCLYSLEAIPLEDLLNNPFNYEVDHIIPRSVSFDNSFNNKVLVKQEE
NSKKGNRTPFQYLSSSDSKISYETFKKHILNLAKGKGRISKTKKEYLLEERDINRFSVQ
KDFINRNLVDTRYATRGLMNLLRSYFRVNNLDVKVKSINGGFTSFLRRKWKFKKER
NKGYKHHAEDALIIANADFIFKEWKKLDKAKKVMENQMFEEKQAESMPEIETEQEY
KEIFITPHQIKHIKDFKDYKYSHRVDKKPNRELINDTLYSTRKDDKGNTLIVNNLNGL
YDKDNDKLKKLINKSPEKLLMYHHDPQTYQKLKLIMEQYGDEKNPLYKYYEETGN
YLTKYSKKDNGPVIKKIKYYGNKLNAHLDITDDYPNSRNKVVKLSLKPYRFDVYLD
NGVYKFVTVKNLDVIKKENYYEVNSKCYEEAKKLKKISNQAEFIASFYNNDLIKING
ELYRVIGVNNDLLNRIEVNMIDITYREYLENMNDKRPPRIIKTIASKTQSIKKYSTDILG
NLYEVKSKKHPQIIKKG

[0140] Residue N579 of SEQ ID NO: 28, which is underlined and in bold, may be mutated (e.g., to a A579) to yield a SaCas9 nickase.

### High Fidelity Cas9 Domains

[0141] Some aspects of the disclosure provide high fidelity Cas9 domains of the nucleobase editors provided herein. In some embodiments, high fidelity Cas9 domains are engineered Cas9 domains comprising one or more mutations that decrease electrostatic interactions between the Cas9 domain and the sugar-phosphate backbone of DNA, as compared to a corresponding wild-type Cas9 domain. Without wishing to be bound by any particular theory, high fidelity Cas9 domains that have decreased electrostatic interactions with the sugar-phosphate backbone of DNA may have less off-target effects. In some embodiments, the Cas9 domain (e.g., a wild type Cas9 domain) comprises one or more mutations that decreases the association between the Cas9 domain and the sugar-phosphate backbone of DNA. In some embodiments, a Cas9 domain comprises one or more mutations that decreases the association between the Cas9 domain and the sugar-phosphate backbone of DNA by at least 1%, at least 2%, at least 3%, at least 4%, at least 5%, at least 10%, at least 15%, at least 20%, at least 25%, at least 30%, at least 35%, at least 40%, at least 45%, at least 50%, at least 55%, at least 60%, at least 65%, at least 70%, or more.

[0142] In some embodiments, any of the Cas9 fusion proteins provided herein comprise one or more of N497X, R661X, Q695X, and/or Q926X mutation of the amino acid sequence provided in SEQ ID NO: 13 (residue numbering as if SEQ ID NO: 13 contained an initiating Methionine at the N-terminus), or a corresponding mutation in another Cas9, wherein X is any amino acid. In some embodiments, any of the Cas9 fusion proteins provided herein comprise one or more of N497A, R661A, Q695A, and/or Q926A mutation of the amino acid sequence provided in SEQ ID NO: 13 (residue numbering as if SEQ ID NO: 13 contained an initiating Methionine at the N-terminus), or a corresponding mutation in another Cas9. In some embodiments, the Cas9 domain comprises a D10A mutation of the amino acid sequence provided in SEQ ID NO: 13, or a corresponding mutation in another Cas9. In some embodiments, the Cas9 domain (e.g., of any of the fusion proteins provided herein) comprises the amino acid sequence as set forth in SEQ ID NO: 29. Cas9 domains with high fidelity are known in the art and would be apparent to the skilled artisan. For example, Cas9 domains with high fidelity have been described in Kleinstiver, B. P., et al. “High-fidelity CRISPR-Cas9 nucleases with no detectable genome-wide off-target effects.” Nature 529, 490-495 (2016); and Slaymaker, I. M., et al. “Rationally engineered Cas9 nucleases with improved specificity.” Science 351, 84-88 (2015); the entire contents of each are incorporated herein by reference.

[0143] It should be appreciated that any of the base editors provided herein, for example, any of the adenosine deaminase base editors provided herein, may be converted into high fidelity base editors by modifying the Cas9 domain as described herein to generate high fidelity base editors, for example, a high fidelity adenosine base editor. In some embodiments, the high fidelity Cas9 domain is a dCas9 domain. In some embodiments, the high fidelity Cas9 domain is a nCas9 domain.

High Fidelity Cas9 domain where mutations relative to Cas9 of SEQ ID
NO: 13 are shown in bold and underlines
(SEQ ID NO: 29)
DKKYSIGLAIGTNSVGWAVITDEYKVPSKKFKVLGNTDRHSIKKNLIGALLFD
SGETAEATRLKRTARRRYTRRKNRICYLQEIFSNEMAKVDDSFFHRLEESFLVEEDK
KHERHPIFGNIVDEVAYHEKYPTIYHLRKKLVDSTDKADLRLIYLALAHMIKFRGHFL
IEGDLNPDNSDVDKLFIQLVQTYNQLFEENPINASGVDAKAILSARLSKSRRLENLIAQ
LPGEKKNGLFGNLIALSLGLTPNFKSNFDLAEDAKLQLSKDTYDDDLDNLLAQIGDQ
YADLFLAAKNLSDAILLSDILRVNTEITKAPLSASMIKRYDEHHQDLTLLKALVRQQL
PEKYKEIFFDQSKNGYAGYIDGGASQEEFYKFIKPILEKMDGTEELLVKLNREDLLRK
QRTFDNGSIPHQIHLGELHAILRRQEDFYPFLKDNREKIEKILTFRIPYYVGPLARGNS
RFAWMTRKSEETITPWNFEEVVDKGASAQSFIERMTAFDKNLPNEKVLPKHSLLYEY
FTVYNELTKVKYVTEGMRKPAFLSGEQKKAIVDLLFKTNRKVTVKQLKEDYFKKIE
CFDSVEISGVEDRFNASLGTYHDLLKIIKDKDFLDNEENEDILEDIVLTLTLFEDREMIE
ERLKTYAHLFDDKVMKQLKRRRYTGWGALSRKLINGIRDKQSGKTILDFLKSDGFA
NRNFMALIHDDSLTFKEDIQKAQVSGQGDSLHEHIANLAGSPAIKKGILQTVKVVDE
LVKVMGRHKPENIVIEMARENQTTQKGQKNSRERMKRIEEGIKELGSQILKEHPVEN
TQLQNEKLYLYYLQNGRDMYVDQELDINRLSDYDVDHIVPQSFLKDDSIDNKVLTR
SDKNRGKSDNVPSEEVVKKMKNYWRQLLNAKLITQRKFDNLTKAERGGLSELDKA
GFIKRQLVETRAITKHVAQILDSRMNTKYDENDKLIREVKVITLKSKLVSDFRKDFQF
YKVREINNYHHAHDAYLNAVVGTALIKKYPKLESEFVYGDYKVYDVRKMIAKSEQ
EIGKATAKYFFYSNIMNFFKTEITLANGEIRKRPLIETNGETGEIVWDKGRDFATVRK
VLSMPQVNIVKKTEVQTGGFSKESILPKRNSDKLIARKKDWDPKKYGGFDSPTVAYS
VLVVAKVEKGKSKKLKSVKELLGITIMERSSFEKNPIDFLEAKGYKEVKKDLIIKLPK
YSLFELENGRKRMLASAGELQKGNELALPSKYVNFLYLASHYEKLKGSPEDNEQKQ
LFVEQHKHYLDEIIEQISEFSKRVILADANLDKVLSAYNKHRDKPIREQAENIIHLFTLT
NLGAPAAFKYFDTTIDRKRYTSTKEVLDATLIHQSITGLYETRIDLSQLGGD
Exemplary Cas9 (VRQR variant)
(SEQ ID NO: 73)
DKKYSIGLAIGTNSVGWAVITDEYKVPSKKFKVLGNTDRHSIKKNLIGALLFD
SGETAEATRLKRTARRRYTRRKNRICYLQEIFSNEMAKVDDSFFHRLEESFLVEEDK
KHERHPIFGNIVDEVAYHEKYPTIYHLRKKLVDSTDKADLRLIYLALAHMIKFRGHFL
IEGDLNPDNSDVDKLFIQLVQTYNQLFEENPINASGVDAKAILSARLSKSRRLENLIAQ
LPGEKKNGLFGNLIALSLGLTPNFKSNFDLAEDAKLQLSKDTYDDDLDNLLAQIGDQ
YADLFLAAKNLSDAILLSDILRVNTEITKAPLSASMIKRYDEHHQDLTLLKALVRQQL
PEKYKEIFFDQSKNGYAGYIDGGASQEEFYKFIKPILEKMDGTEELLVKLNREDLLRK
QRTFDNGSIPHQIHLGELHAILRRQEDFYPFLKDNREKIEKILTFRIPYYVGPLARGNS
RFAWMTRKSEETITPWNFEEVVDKGASAQSFIERMTNFDKNLPNEKVLPKHSLLYEY
FTVYNELTKVKYVTEGMRKPAFLSGEQKKAIVDLLFKTNRKVTVKQLKEDYFKKIE
CFDSVEISGVEDRFNASLGTYHDLLKIIKDKDFLDNEENEDILEDIVLTLTLFEDREMIE
ERLKTYAHLFDDKVMKQLKRRRYTGWGRLSRKLINGIRDKQSGKTILDFLKSDGFA
NRNFMQLIHDDSLTFKEDIQKAQVSGQGDSLHEHIANLAGSPAIKKGILQTVKVVDE
LVKVMGRHKPENIVIEMARENQTTQKGQKNSRERMKRIEEGIKELGSQILKEHPVEN
TQLQNEKLYLYYLQNGRDMYVDQELDINRLSDYDVDHIVPQSFLKDDSIDNKVLTR
SDKNRGKSDNVPSEEVVKKMKNYWRQLLNAKLITQRKFDNLTKAERGGLSELDKA
GFIKRQLVETRQITKHVAQILDSRMNTKYDENDKLIREVKVITLKSKLVSDFRKDFQF
YKVREINNYHHAHDAYLNAVVGTALIKKYPKLESEFVYGDYKVYDVRKMIAKSEQ
EIGKATAKYFFYSNIMNFFKTEITLANGEIRKRPLIETNGETGEIVWDKGRDFATVRK
VLSMPQVNIVKKTEVQTGGFSKESILPKRNSDKLIARKKDWDPKKYGGFVSPTVAYS
VLVVAKVEKGKSKKLKSVKELLGITIMERSSFEKNPIDFLEAKGYKEVKKDLIIKLPK
YSLFELENGRKRMLASARELQKGNELALPSKYVNFLYLASHYEKLKGSPEDNEQKQ
LFVEQHKHYLDEIIEQISEFSKRVILADANLDKVLSAYNKHRDKPIREQAENIIHLFTLT
NLGAPAAFKYFDTTIDRKQYRSTKEVLDATLIHQSITGLYETRIDLSQLGGD

### Nuclear Localization Signals (NLSs)

[0144] In various embodiments, the base editors disclosed herein further comprise one or more, preferably at least two nuclear localization signals. In a preferred embodiment, the base editors comprise at least two NLSs. In embodiments with at least two NLSs, the NLSs can be the same NLSs or they can be different NLSs. In addition, the NLSs may be expressed as part of a fusion protein with the remaining portions of the base editors. The location of the NLS fusion can be at the N-terminus, the C-terminus, or within a sequence of a base editor (e.g., inserted between the encoded napDNA/RNAbp component (e.g., Cas9) and a DNA effector moiety (e.g., a deaminase)).

[0145] The NLSs may be any known NLS sequence in the art. The NLSs may also be any future-discovered NLSs for nuclear localization. The NLSs also may be any naturally-occurring NLS, or any non-naturally occurring NLS (e.g., an NLS with one or more desired mutations).

[0146] A nuclear localization signal or sequence (NLS) is an amino acid sequence that tags, designates, or otherwise marks a protein for import into the cell nucleus by nuclear transport. Typically, this signal consists of one or more short sequences of positively charged lysines or arginines exposed on the protein surface. Different nuclear localized proteins may share the same NLS. An NLS has the opposite function of a nuclear export signal (NES), which targets proteins out of the nucleus. A nuclear localization signal can also target the exterior surface of a cell. Thus, a single nuclear localization signal can direct the entity with which it is associated to the exterior of a cell and to the nucleus of a cell. Such sequences can be of any size and composition, for example more than 25, 25, 15, 12, 10, 8, 7, 6, 5 or 4 amino acids, but will preferably comprise at least a four to eight amino acid sequence known to function as a nuclear localization signal (NLS).

[0147] The term “nuclear localization sequence” or “NLS” refers to an amino acid sequence that promotes import of a protein into the cell nucleus, for example, by nuclear transport. Nuclear localization sequences are known in the art and would be apparent to the skilled artisan. For example, NLS sequences are described in Plank et al., international PCT application, PCT/EP2000/011690, filed Nov. 23, 2000, published as WO/2001/038547 on May 31, 2001, the contents of which are incorporated herein by reference for their disclosure of exemplary nuclear localization sequences. In some embodiments, a NLS comprises the amino acid sequence PKKKRKV (SEQ ID NO: 30), MDSLLMNRRKFLYQFKNVRWAKGRRETYLC (SEQ ID NO: 31), KRTADGSEFESPKKKRKV (SEQ ID NO: 32), or KRTADGSEFEPKKKRKV (SEQ ID NO: 33).

[0148] In one aspect of the invention, a base editor (e.g., a known base editor, such as ABE) may be modified with one or more nuclear localization signals (NLS), preferably at least two NLSs. In preferred embodiments, the base editors are modified with two or more NLSs. The invention contemplates the use of any nuclear localization signal known in the art at the time of the invention, or any nuclear localization signal that is identified or otherwise made available in the state of the art after the time of the instant filing. A representative nuclear localization signal is a peptide sequence that directs the protein to the nucleus of the cell in which the sequence is expressed. A nuclear localization signal is predominantly basic, can be positioned almost anywhere in a protein's amino acid sequence, generally comprises a short sequence of four amino acids (Autieri & Agrawal, (1998) J. Biol. Chem. 273: 14731-37, incorporated herein by reference) to eight amino acids, and is typically rich in lysine and arginine residues (Magin et al., (2000) Virology 274: 11-16, incorporated herein by reference). Nuclear localization signals often comprise proline residues. A variety of nuclear localization signals have been identified and have been used to effect transport of biological molecules from the cytoplasm to the nucleus of a cell. See, e.g., Tinland et al., (1992) Proc. Natl. Acad. Sci. U.S.A. 89:7442-46; Moede et al., (1999) FEBS Leff. 461:229-34, which is incorporated by reference. Translocation is currently thought to involve nuclear pore proteins.

[0149] Most NLSs can be classified in three general groups: (i) a monopartite NLS exemplified by the SV40 large T antigen NLS (PKKKRKV SEQ ID NO: 30); (ii) a bipartite motif consisting of two basic domains separated by a variable number of spacer amino acids and exemplified by the Xenopus nucleoplasmin NLS (KRXXXXXXXXXXKKKL SEQ ID NO: 33); and (iii) noncanonical sequences such as M9 of the hnRNP Al protein, the influenza virus nucleoprotein NLS, and the yeast Gal4 protein NLS (Dingwall and Laskey 1991).

[0150] Nuclear localization signals appear at various points in the amino acid sequences of proteins. NLS's have been identified at the N-terminus, the C-terminus and in the central region of proteins. Thus, the specification provides base editors that may be modified with one or more NLSs at the C-terminus, the N-terminus, as well as at in internal region of the base editor. The residues of a longer sequence that do not function as component NLS residues should be selected so as not to interfere, for example tonically or sterically, with the nuclear localization signal itself. Therefore, although there are no strict limits on the composition of an NLS-comprising sequence, in practice, such a sequence can be functionally limited in length and composition.

[0151] The present disclosure contemplates any suitable means by which to modify a base editor to include one or more NLSs. In one aspect, the base editors can be engineered to express a base editor protein that is translationally fused at its N-terminus or its C-terminus (or both) to one or more NLSs, i.e., to form a base editor-NLS fusion construct. In other embodiments, the base editor-encoding nucleotide sequence can be genetically modified to incorporate a reading frame that encodes one or more NLSs in an internal region of the encoded base editor. In addition, the NLSs may include various amino acid linkers or spacer regions encoded between the base editor and the N-terminally, C-terminally, or internally-attached NLS amino acid sequence, e.g, and in the central region of proteins. Thus, the present disclosure also provides for nucleotide constructs, vectors, and host cells for expressing fusion proteins that comprise a base editor and one or more NLSs.

[0152] The improved base editors described herein may also comprise nuclear localization signals which are linked to a base editor through one or more linkers, e.g., and polymeric, amino acid, nucleic acid, polysaccharide, chemical, or nucleic acid linker element. The linkers within the contemplated scope of the disclosure are not intended to have any limitations and can be any suitable type of molecule (e.g., polymer, amino acid, polysaccharide, nucleic acid, lipid, or any synthetic chemical linker moiety) and be joined to the base editor by any suitable strategy that effectuates forming a bond (e.g., covalent linkage, hydrogen bonding) between the base editor and the one or more NLSs.

### Linkers

[0153] In certain embodiments, linkers may be used to link any of the protein or protein domains described herein. The linker may be as simple as a covalent bond, or it may be a polymeric linker many atoms in length. In certain embodiments, the linker is a polypeptide or based on amino acids. In other embodiments, the linker is not peptide-like. In certain embodiments, the linker is a covalent bond (e.g., a carbon-carbon bond, disulfide bond, carbon-heteroatom bond, etc.). In certain embodiments, the linker is a carbon-nitrogen bond of an amide linkage. In certain embodiments, the linker is a cyclic or acyclic, substituted or unsubstituted, branched or unbranched aliphatic or heteroaliphatic linker. In certain embodiments, the linker is polymeric (e.g., polyethylene, polyethylene glycol, polyamide, polyester, etc.). In certain embodiments, the linker comprises a monomer, dimer, or polymer of aminoalkanoic acid. In certain embodiments, the linker comprises an aminoalkanoic acid (e.g., glycine, ethanoic acid, alanine, beta-alanine, 3-aminopropanoic acid, 4-aminobutanoic acid, 5-pentanoic acid, etc.). In certain embodiments, the linker comprises a monomer, dimer, or polymer of aminohexanoic acid (Ahx). In certain embodiments, the linker is based on a carbocyclic moiety (e.g., cyclopentane, cyclohexane). In other embodiments, the linker comprises a polyethylene glycol moiety (PEG). In other embodiments, the linker comprises amino acids. In certain embodiments, the linker comprises a peptide. In certain embodiments, the linker comprises an aryl or heteroaryl moiety. In certain embodiments, the linker is based on a phenyl ring. The linker may include functionalized moieties to facilitate attachment of a nucleophile (e.g., thiol, amino) from the peptide to the linker. Any electrophile may be used as part of the linker. Exemplary electrophiles include, but are not limited to, activated esters, activated amides, Michael acceptors, alkyl halides, aryl halides, acyl halides, and isothiocyanates.

[0154] In some embodiments, the linker is an amino acid or a plurality of amino acids (e.g., a peptide or protein). In some embodiments, the linker is a bond e.g., a covalent bond), an organic molecule, group, polymer, or chemical moiety. In some embodiments, the linker is 5-100 amino acids in length, for example, 5, 6, 7, 8, 9, 10, 11, 12, 13, 14, 15, 16, 17, 18, 19, 20, 21, 22, 23, 24, 25, 26, 27, 28, 29, 30, 31, 32, 33, 34, 35-40, 40-45, 45-50, 50-60, 60-70, 70-80, 80-90, 90-100, 100-110, 110-120, 120-130, 130-140, 140-150, or 150-200 amino acids in length. Longer or shorter linkers are also contemplated. In some embodiments, a linker comprises the amino acid sequence SGSETPGTSESATPES (SEQ ID NO: 74), which may also be referred to as the XTEN linker. In some embodiments, the linker is 32 amino acids in length. In some embodiments, the linker comprises the amino acid sequence (SGGS)₂-SGSETPGTSESATPES-(SGGS)₂ (SEQ ID NO: 75), which may also be referred to as (SGGS)₂-XTEN-(SGGS)₂. In some embodiments, the linker comprises the amino acid sequence, wherein n is 0, 1, 2, 3, 4, 5, 6, 7, 8, 9, or 10. In some embodiments, a linker comprises the amino acid sequence SGGS (SEQ ID NO: 76). In some embodiments, a linker comprises (SGGS)ₙ(SEQ ID NO: 76), (GGGS)ₙ(SEQ ID NO: 77), (GGGGS)ₙ(SEQ ID NO: 78), (G)ₙ (SEQ ID NO: 117), (EAAAK)ₙ (SEQ ID NO: 79), (SGGS)ₙ-SGSETPGTSESATPES-(SGGS)ₙ(SEQ ID NO: 80), (GGS)ₙ (SEQ ID NO: 118), SGSETPGTSESATPES (SEQ ID NO: 74), or (XP)ₙ (SEQ ID NO: 119) motif, or a combination of any of these, wherein n is independently an integer between 1 and 30, and wherein X is any amino acid. In some embodiments, n is 1, 2, 3, 4, 5, 6, 7, 8, 9, 10, 11, 12, 13, 14, or 15. In some embodiments, a linker comprises SGSETPGTSESATPES (SEQ ID NO: 74), and SGGS (SEQ ID NO: 76). In some embodiments, a linker comprises SGGSSGSETPGTSESATPESSGGS (SEQ ID NO: 81). In some embodiments, a linker comprises SGGSSGGSSGSETPGTSESATPESSGGSSGGS (SEQ ID NO: 82). In some embodiments, a linker comprises GGSGGSPGSPAGSPTSTEEGTSESATPESGPGTSTEPSEGSAPGSPAGSPTSTEEGTSTE PSEGSAPGTSTEPSEGSAPGTSESATPESGPGSEPATSGGSGGS (SEQ ID NO: 83). In some embodiments, the linker is 24 amino acids in length. In some embodiments, the linker comprises the amino acid sequence SGGSSGGSSGSETPGTSESATPES (SEQ ID NO: 84). In some embodiments, the linker is 40 amino acids in length. In some embodiments, the linker comprises the amino acid sequence SGGSSGGSSGSETPGTSESATPESSGGSSGGSSGGSSGGS (SEQ ID NO: 85). In some embodiments, the linker is 64 amino acids in length. In some embodiments, the linker comprises the amino acid sequence SGGSSGGSSGSETPGTSESATPESSGGSSGGSSGGSSGGSSGSETPGTSESATPESSGGS SGGS (SEQ ID NO: 86). In some embodiments, the linker is 92 amino acids in length. In some embodiments, the linker comprises the amino acid sequence PGSPAGSPTSTEEGTSESATPESGPGTSTEPSEGSAPGSPAGSPTSTEEGTSTEPSEGSAP GTSTEPSEGSAPGTSESATPESGPGSEPATS (SEQ ID NO: 87). It should be appreciated that any of the linkers provided herein may be used to link a first adenosine deaminase and a second adenosine deaminase; an adenosine deaminase (e.g., a first or a second adenosine deaminase) and a napDNAbp; a napDNAbp and an NLS; or an adenosine deaminase (e.g., a first or a second adenosine deaminase) and an NLS.

[0155] In some embodiments, any of the fusion proteins provided herein, comprise an adenosine deaminase and a napDNAbp that are fused to each other via a linker. In some embodiments, any of the fusion proteins provided herein, comprise a first adenosine deaminase and a second adenosine deaminase that are fused to each other via a linker. In some embodiments, any of the fusion proteins provided herein, comprise an NLS, which may be fused to an adenosine deaminase (e.g., a first and/or a second adenosine deaminase), a nucleic acid programmable DNA binding protein (napDNAbp. Various linker lengths and flexibilities between an adenosine deaminase (e.g., an engineered ecTadA) and a napDNAbp (e.g., a Cas9 domain), and/or between a first adenosine deaminase and a second adenosine deaminase can be employed (e.g., ranging from very flexible linkers of the form (GGGGS). (SEQ ID NO: 77), (GGGGS)ₙ (SEQ ID NO: 78), and (G)ₙ (SEQ ID NO: 117) to more rigid linkers of the form (EAAAK)ₙ (SEQ ID NO: 79), (SGGS)ₙ (SEQ ID NO: 76), SGSETPGTSESATPES (SEQ ID NO: 74) (see, e.g., Guilinger J P, Thompson D B, Liu D R. Fusion of catalytically inactive Cas9 to FokI nuclease improves the specificity of genome modification. Nat. Biotechnol. 2014; 32(6): 577-82; the entire contents are incorporated herein by reference) and (XP)ₙ (SEQ ID NO: 119)) in order to achieve the optimal length for deaminase activity for the specific application. In some embodiments, n is 1, 2, 3, 4, 5, 6, 7, 8, 9, 10, 11, 12, 13, 14, or 15. In some embodiments, the linker comprises a (GGS)ₙ (SEQ ID NO: 120) motif, wherein n is 1, 3, or 7. In some embodiments, the adenosine deaminase and the napDNAbp, and/or the first adenosine deaminase and the second adenosine deaminase of any of the fusion proteins provided herein are fused via a linker comprising the amino acid sequence SGSETPGTSESATPES (SEQ ID NO: 74), SGGS (SEQ ID NO: 76), SGGSSGSETPGTSESATPESSGGS (SEQ ID NO: 81), SGGSSGGSSGSETPGTSESATPESSGGSSGGS (SEQ ID NO: 82), or GGSGGSPGSPAGSPTSTEEGTSESATPESGPGTSTEPSEGSAPGSPAGSPTSTEEGTSTE PSEGSAPGTSTEPSEGSAPGTSESATPESGPGSEPATSGGSGGS (SEQ ID NO: 83). In some embodiments, the linker is 24 amino acids in length. In some embodiments, the linker comprises the amino acid sequence SGGSSGGSSGSETPGTSESATPES (SEQ ID NO: 84). In some embodiments, the linker is 32 amino acids in length. In some embodiments, the linker is 32 amino acids in length. In some embodiments, the linker comprises the amino acid sequence (SGGS)₂-SGSETPGTSESATPES-(SGGS)₂ (SEQ ID NO: 75), which may also be referred to as (SGGS)₂-XTEN-(SGGS)₂. In some embodiments, the linker comprises the amino acid sequence, wherein n is 0, 1, 2, 3, 4, 5, 6, 7, 8, 9, or 10. In some embodiments, the linker is 40 amino acids in length. In some embodiments, the linker comprises the amino acid sequence SGGSSGGSSGSETPGTSESATPESSGGSSGGSSGGSSGGS (SEQ ID NO: 85). In some embodiments, the linker is 64 amino acids in length. In some embodiments, the linker comprises the amino acid sequence SGGSSGGSSGSETPGTSESATPESSGGSSGGSSGGSSGGSSGSETPGTSESATPESSGGS SGGS (SEQ ID NO: 86). In some embodiments, the linker is 92 amino acids in length. In some embodiments, the linker comprises the amino acid sequence PGSPAGSPTSTEEGTSESATPESGPGTSTEPSEGSAPGSPAGSPTSTEEGTSTEPSEGSAP GTSTEPSEGSAPGTSESATPESGPGSEPATS (SEQ ID NO: 87).

### Fusion Proteins (e.g., Base Editors) Comprising a Nuclease Programmable DNA Binding Protein and an Adenosine Deaminase

[0156] Some aspects of the disclosure provide fusion proteins comprising a nucleic acid programmable DNA binding protein (napDNAbp) and an adenosine deaminase. In some embodiments, any of the fusion proteins provided herein are base editors. In some embodiments, the napDNAbp is a Cas9 domain, a Cpf1 domain, a CasX domain, a CasY domain, a C2c1 domain, a C2c2 domain, aC2c3 domain, or an Argonaute domain. In some embodiments, the napDNAbp is any napDNAbp provided herein. Some aspects of the disclosure provide fusion proteins comprising a Cas9 domain and an adenosine deaminase. The Cas9 domain may be any of the Cas9 domains or Cas9 proteins (e.g., dCas9 or nCas9) provided herein. In some embodiments, any of the Cas9 domains or Cas9 proteins (e.g., dCas9 or nCas9) provided herein may be fused with any of the adenosine deaminases provided herein. In some embodiments, the fusion protein comprises the structure:
[0157] NH₂-[adenosine deaminase]-[napDNAbp]-COOH; or
[0158] NH₂-[napDNAbp]-[adenosine deaminase]-COOH

[0159] In some embodiments, the fusion proteins comprising an adenosine deaminase and a napDNAbp (e.g., Cas9 domain) do not include a linker sequence. In some embodiments, a linker is present between the adenosine deaminase domain and the napDNAbp. In some embodiments, the “-” used in the general architecture above indicates the presence of an optional linker. In some embodiments, the adenosine deaminase and the napDNAbp are fused via any of the linkers provided herein. For example, in some embodiments the adenosine deaminase and the napDNAbp are fused via any of the linkers provided below in the section entitled “Linkers”. In some embodiments, the adenosine deaminase and the napDNAbp are fused via a linker that comprises between 1 and 200 amino acids. In some embodiments, the adenosine deaminase and the napDNAbp are fused via a linker that comprises from 1 to 5, 1 to 10, 1 to 20, 1 to 30, 1 to 40, 1 to 50, 1 to 60, 1 to 80, 1 to 100, 1 to 150, 1 to 200, 5 to 10, 5 to 20, 5 to 30, 5 to 40, 5 to 60, 5 to 80, 5 to 100, 5 to 150, 5 to 200, 10 to 20, 10 to 30, 10 to 40, 10 to 50, 10 to 60, 10 to 80, 10 to l00, 10 to 150, 10 to 200, 20 to 30, 20 to 40, 20 to 50, 20 to 60, 20 to 80, 20 to 100, 20 to 150, 20 to 200, 30 to 40, 30 to 50, 30 to 60, 30 to 80, 30 to l00, 30 to 150, 30 to 200, 40 to 50, 40 to 60, 40 to 80, 40 to 100, 40 to 150, 40 to 200, 50 to 60 50 to 80, 50 to l00, 50 to 150, 50 to 200, 60 to 80, 60 to 100, 60 to 150, 60 to 200, 80 to 100, 80 to 150, 80 to 200, 100 to 150, 100 to 200, or 150 to 200 amino acids in length. In some embodiments, the adenosine deaminase and the napDNAbp are fused via a linker that comprises 3, 4, 16, 24, 32, 64, 100, or 104 amino acids in length. In some embodiments, the adenosine deaminase and the napDNAbp are fused via a linker that comprises the amino acid sequence of SGSETPGTSESATPES (SEQ ID NO: 74), SGGS (SEQ ID NO: 76), SGGSSGSETPGTSESATPESSGGS (SEQ ID NO: 81), SGGSSGGSSGSETPGTSESATPESSGGSSGGS (SEQ ID NO: 82), or GGSGGSPGSPAGSPTSTEEGTSESATPESGPGTSTEPSEGSAPGSPAGSPTSTEEGTSTE PSEGSAPGTSTEPSEGSAPGTSESATPESGPGSEPATSGGSGGS (SEQ ID NO: 83). In some embodiments, the adenosine deaminase and the napDNAbp are fused via a linker comprising the amino acid sequence SGSETPGTSESATPES (SEQ ID NO: 74), which may also be referred to as the XTEN linker. In some embodiments, the linker is 24 amino acids in length. In some embodiments, the linker comprises the amino acid sequence SGGSSGGSSGSETPGTSESATPES (SEQ ID NO: 84). In some embodiments, the linker is 32 amino acids in length. In some embodiments, the linker comprises the amino acid sequence (SGGS)₂-SGSETPGTSESATPES-(SGGS)₂ (SEQ ID NO: 75), which may also be referred to as (SGGS)₂-XTEN-(SGGS)₂. In some embodiments, the linker comprises the amino acid sequence (SGGS)ₙ-SGSETPGTSESATPES-(SGGS)ₙ(SEQ ID NO: 80), wherein n is 0, 1, 2, 3, 4, 5, 6, 7, 8, 9, or 10. In some embodiments, the linker is 40 amino acids in length. In some embodiments, the linker comprises the amino acid sequence SGGSSGGSSGSETPGTSESATPESSGGSSGGSSGGSSGGS (SEQ ID NO: 85). In some embodiments, the linker is 64 amino acids in length. In some embodiments, the linker comprises the amino acid sequence SGGSSGGSSGSETPGTSESATPESSGGSSGGSSGGSSGGSSGSETPGTSESATPESSGGS SGGS (SEQ ID NO: 86). In some embodiments, the linker is 92 amino acids in length. In some embodiments, the linker comprises the amino acid sequence PGSPAGSPTSTEEGTSESATPESGPGTSTEPSEGSAPGSPAGSPTSTEEGTSTEPSEGSAP GTSTEPSEGSAPGTSESATPESGPGSEPATS (SEQ ID NO: 87).

### Fusion Proteins (e.g., Base Editors) Comprising a Nuclear Localization Sequence (NLS)

[0160] In some embodiments, the fusion proteins provided herein further comprise one or more nuclear targeting sequences, for example, a nuclear localization sequence (NLS). In some embodiments, a NLS comprises an amino acid sequence that facilitates the importation of a protein, that comprises an NLS, into the cell nucleus (e.g., by nuclear transport). In some embodiments, any of the fusion proteins provided herein further comprise a nuclear localization sequence (NLS). In some embodiments, the NLS is fused to the N-terminus of the fusion protein. In some embodiments, the NLS is fused to the C-terminus of the fusion protein. In some embodiments, the NLS is fused to the N-terminus of the napDNAbp. In some embodiments, the NLS is fused to the C-terminus of the napDNAbp. In some embodiments, the NLS is fused to the N-terminus of the adenosine deaminase. In some embodiments, the NLS is fused to the C-terminus of the adenosine deaminase. In some embodiments, the NLS is fused to the fusion protein via one or more linkers. In some embodiments, the NLS is fused to the fusion protein without a linker. In some embodiments, the NLS comprises an amino acid sequence of any one of the NLS sequences provided or referenced herein. In some embodiments, the NLS comprises an amino acid sequence as set forth in any one of SEQ ID NOs: 30-33. Additional nuclear localization sequences are known in the art and would be apparent to the skilled artisan. For example, NLS sequences are described in Plank et al., PCT/EP2000/011690, the contents of which are incorporated herein by reference for their disclosure of exemplary nuclear localization sequences.

[0161] In some embodiments, the general architecture of exemplary fusion proteins with an adenosine deaminase and a napDNAbp comprises any one of the following structures, where NLS is a nuclear localization sequence (e.g., any NLS provided herein), NH₂ is the N-terminus of the fusion protein, and COOH is the C-terminus of the fusion protein. Fusion proteins comprising an adenosine deaminase, a napDNAbp, and a NLS:
[0162] NH₂—[NLS]-[adenosine deaminase]-[napDNAbp]-COOH;
[0163] NH₂-[adenosine deaminase]-[NLS]-[napDNAbp]-COOH;
[0164] NH₂-[adenosine deaminase]-[napDNAbp]-[NLS]—COOH;
[0165] NH₂—[NLS]-[napDNAbp]-[adenosine deaminase]-COOH;
[0166] NH₂-[napDNAbp]-[NLS]-[adenosine deaminase]-COOH; and
[0167] NH₂-[napDNAbp]-[adenosine deaminase]-[NLS]—COOH.

[0168] In some embodiments, the fusion proteins provided herein do not comprise a linker. In some embodiments, a linker is present between one or more of the domains or proteins (e.g., adenosine deaminase, napDNAbp, and/or NLS). In some embodiments, the “-” used in the general architecture above indicates the presence of an optional linker.

[0169] Some aspects of the disclosure provide fusion proteins that comprise a nucleic acid programmable DNA binding protein (napDNAbp) and at least two adenosine deaminase domains. Without wishing to be bound by any particular theory, dimerization of adenosine deaminases (e.g., in cis or in trans) may improve the ability (e.g., efficiency) of the fusion protein to modify a nucleic acid base, for example to deaminate adenine. In some embodiments, any of the fusion proteins may comprise 2, 3, 4 or 5 adenosine deaminase domains. In some embodiments, any of the fusion proteins provided herein comprise two adenosine deaminases. In some embodiments, any of the fusion proteins provided herein contain only two adenosine deaminases. In some embodiments, the adenosine deaminases are the same. In some embodiments, the adenosine deaminases are any of the adenosine deaminases provided herein. In some embodiments, the adenosine deaminases are different. In some embodiments, the first adenosine deaminase is any of the adenosine deaminases provided herein, and the second adenosine is any of the adenosine deaminases provided herein, but is not identical to the first adenosine deaminase. As one example, the fusion protein may comprise a first adenosine deaminase and a second adenosine deaminase that both comprise the amino acid sequence of SEQ ID NO: 10, which contains a W23R; H36L; P48A; R51L; L84F; A106V; D108N; H123Y; S146C; D147Y; R152P; E155V; I156F; and K157N mutation from ecTadA (SEQ ID NO: 1). In some embodiments, the fusion protein may comprise a first adenosine deaminase that comprises the amino acid sequence of SEQ ID NO: 1, and a second adenosine deaminase domain that comprises the amino amino acid sequence of TadA7.10 of SEQ ID NO: 10. Additional fusion protein constructs comprising two adenosine deaminase domains are illustrated herein and are provided in the art.

[0170] In some embodiments, the fusion protein comprises two adenosine deaminases (e.g., a first adenosine deaminase and a second adenosine deaminase). In some embodiments, the fusion protein comprises a first adenosine deaminase and a second adenosine deaminase. In some embodiments, the first adenosine deaminase is N-terminal to the second adenosine deaminase in the fusion protein. In some embodiments, the first adenosine deaminase is C-terminal to the second adenosine deaminase in the fusion protein. In some embodiments, the first adenosine deaminase and the second deaminase are fused directly or via a linker. In some embodiments, the linker is any of the linkers provided herein, for example, any of the linkers described in the “Linkers” section. In some embodiments, the linker comprises the amino acid sequence of any one of SEQ ID NOs: 74-87. In some embodiments, the linker is 32 amino acids in length. In some embodiments, the linker comprises the amino acid sequence (SGGS)₂-SGSETPGTSESATPES-(SGGS)₂ (SEQ ID NO: 75), which may also be referred to as (SGGS)₂-XTEN-(SGGS)₂. In some embodiments, the linker comprises the amino acid sequence (SGGS)ₙ-SGSETPGTSESATPES-(SGGS)ₙ(SEQ ID NO: 80), wherein n is 0, 1, 2, 3, 4, 5, 6, 7, 8, 9, or 10. In some embodiments, the first adenosine deaminase is the same as the second adenosine deaminase. In some embodiments, the first adenosine deaminase and the second adenosine deaminase are any of the adenosine deaminases described herein. In some embodiments, the first adenosine deaminase and the second adenosine deaminase are different. In some embodiments, the first adenosine deaminase is any of the adenosine deaminases provided herein. In some embodiments, the second adenosine deaminase is any of the adenosine deaminases provided herein but is not identical to the first adenosine deaminase. In some embodiments, the first adenosine deaminase is an ecTadA adenosine deaminase. In some embodiments, the first adenosine deaminase comprises an amino acid sequence that is at least 60%, at least 65%, at least 70%, at least 75%, at least 80%, at least 85%, at least 90%, at least 95%, at least 96%, at least 97%, at least 98%, at least 99%, or at least 99.5% identical to any one of the amino acid sequences set forth in any one of SEQ ID NOs: 1-10, or to any of the adenosine deaminases provided herein. In some embodiments, the first adenosine deaminase comprises the amino acid sequence of SEQ ID NO: 1. In some embodiments, the second adenosine deaminase comprises an amino acid sequence that is at least 60%, at least 65%, at least 70%, at least 75%, at least 80%, at least 85%, at least 90%, at least 95%, at least 96%, at least 97%, at least 98%, at least 99%, or at least 99.5% identical to any one of the amino acid sequences set forth in any one of SEQ ID NOs: 1-10, or to any of the adenosine deaminases provided herein. In some embodiments, the second adenosine deaminase comprises the amino acid sequence of SEQ ID NO: 10.

[0171] In some embodiments, the general architecture of exemplary fusion proteins with a first adenosine deaminase, a second adenosine deaminase, and a napDNAbp comprises any one of the following structures, where NLS is a nuclear localization sequence (e.g., any NLS provided herein), NH₂ is the N-terminus of the fusion protein, and COOH is the C-terminus of the fusion protein.

[0172] Fusion proteins comprising a first adenosine deaminase, a second adenosine deaminase, and a napDNAbp.
[0173] NH₂-[first adenosine deaminase]-[second adenosine deaminase]-[napDNAbp]-COOH;
[0174] NH₂-[first adenosine deaminase]-[napDNAbp]-[second adenosine deaminase]-COOH;
[0175] NH₂-[napDNAbp]-[first adenosine deaminase]-[second adenosine deaminase]-COOH;
[0176] NH₂-[second adenosine deaminase]-[first adenosine deaminase]-[napDNAbp]-COOH;
[0177] NH₂-[second adenosine deaminase]-[napDNAbp]-[first adenosine deaminase]-COOH;
[0178] NH₂-[napDNAbp]-[second adenosine deaminase]-[first adenosine deaminase]-COOH;

[0179] In some embodiments, the fusion proteins provided herein do not comprise a linker. In some embodiments, a linker is present between one or more of the domains or proteins (e.g., first adenosine deaminase, second adenosine deaminase, and/or napDNAbp). In some embodiments, the “-” used in the general architecture above indicates the presence of an optional linker.

[0180] Fusion proteins comprising a first adenosine deaminase, a second adenosine deaminase, a napDNAbp, and an NLS.
[0181] NH₂—[NLS]-[first adenosine deaminase]-[second adenosine deaminase]-[napDNAbp]-COOH;
[0182] NH₂-[first adenosine deaminase]-[NLS]-[second adenosine deaminase]-[napDNAbp]-COOH;
[0183] NH₂-[first adenosine deaminase]-[second adenosine deaminase]-[NLS]-[napDNAbp]-COOH;
[0184] NH₂-[first adenosine deaminase]-[second adenosine deaminase]-[napDNAbp]-[NLS]—COOH;
[0185] NH₂—[NLS]-[first adenosine deaminase]-[napDNAbp]-[second adenosine deaminase]-COOH;
[0186] NH₂-[first adenosine deaminase]-[NLS]-[napDNAbp]-[second adenosine deaminase]-COOH;
[0187] NH₂-[first adenosine deaminase]-[napDNAbp]-[NLS]-[second adenosine deaminase]-COOH;
[0188] NH₂-[first adenosine deaminase]-[napDNAbp]-[second adenosine deaminase]-[NLS]—COOH;
[0189] NH₂—[NLS]-[napDNAbp]-[first adenosine deaminase]-[second adenosine deaminase]-COOH;
[0190] NH₂-[napDNAbp]-[NLS]-[first adenosine deaminase]-[second adenosine deaminase]-COOH;
[0191] NH₂-[napDNAbp]-[first adenosine deaminase]-[NLS]-[second adenosine deaminase]-COOH;
[0192] NH₂-[napDNAbp]-[first adenosine deaminase]-[second adenosine deaminase]-[NLS]—COOH;
[0193] NH₂—[NLS]-[second adenosine deaminase]-[first adenosine deaminase]-[napDNAbp]-COOH;
[0194] NH₂-[second adenosine deaminase]-[NLS]-[first adenosine deaminase]-[napDNAbp]-COOH;
[0195] NH₂-[second adenosine deaminase]-[first adenosine deaminase]-[NLS]-[napDNAbp]-COOH;
[0196] NH₂-[second adenosine deaminase]-[first adenosine deaminase]-[napDNAbp]-[NLS]—COOH;
[0197] NH₂—[NLS]-[second adenosine deaminase]-[napDNAbp]-[first adenosine deaminase]-COOH;
[0198] NH₂-[second adenosine deaminase]-[NLS]-[napDNAbp]-[first adenosine deaminase]-COOH;
[0199] NH₂-[second adenosine deaminase]-[napDNAbp]-[NLS]-[first adenosine deaminase]-COOH;
[0200] NH₂-[second adenosine deaminase]-[napDNAbp]-[first adenosine deaminase]-[NLS]—COOH;
[0201] NH₂—[NLS]-[napDNAbp]-[second adenosine deaminase]-[first adenosine deaminase]-COOH;
[0202] NH₂-[napDNAbp]-[NLS]-[second adenosine deaminase]-[first adenosine deaminase]-COOH;
[0203] NH₂-[napDNAbp]-[second adenosine deaminase]-[NLS]-[first adenosine deaminase]-COOH;
[0204] NH₂-[napDNAbp]-[second adenosine deaminase]-[first adenosine deaminase]-[NLS]—COOH;

[0205] In some embodiments, the fusion proteins provided herein do not comprise a linker. In some embodiments, a linker is present between one or more of the domains or proteins (e.g., first adenosine deaminase, second adenosine deaminase, napDNAbp, and/or NLS). In some embodiments, the “-” used in the general architecture above indicates the presence of an optional linker.

[0206] It should be appreciated that the fusion proteins of the present disclosure may comprise one or more additional features. For example, in some embodiments, the fusion protein may comprise cytoplasmic localization sequences, export sequences, such as nuclear export sequences, or other localization sequences, as well as sequence tags that are useful for solubilization, purification, or detection of the fusion proteins. Suitable protein tags provided herein include, but are not limited to, biotin carboxylase carrier protein (BCCP) tags, myc-tags, calmodulin-tags, FLAG-tags, hemagglutinin (HA)-tags, polyhistidine tags, also referred to as histidine tags or His-tags, maltose binding protein (MBP)-tags, nus-tags, glutathione-S-transferase (GST)-tags, green fluorescent protein (GFP)-tags, thioredoxin-tags, S-tags, Softags (e.g., Softag 1, Softag 3), strep-tags, biotin ligase tags, FlAsH tags, V5 tags, and SBP-tags. Additional suitable sequences will be apparent to those of skill in the art. In some embodiments, the fusion protein comprises one or more His tags.

[0207] Some aspects of the disclosure provide fusion proteins comprising a Cas9 domain and an adenosine deaminase. Exemplary fusion proteins include, without limitation, the following fusion proteins (for the purposes of clarity, the adenosine deaminase domain is shown in Bold; mutations of the ecTadA deaminase domain are shown in Bold underlining; the XTEN linker is shown in italics; the UGI/AAG/EndoV domains are shown in Bold italics; and NLS is shown in underlined italics):

ecTadA(wt)-XTEN-nCas9-NLS:
(SEQ ID NO: 88)
MSEVEFSHEYWMRHALTLAKRAWDEREVPVGAVLVHNNRVIGEGWNRPIGRH
DPTAHAEIMALRQGGLVMQNYRLIDATLYVTLEPCVMCAGAMIHSRIGRVVFG
ARDAKTGAAGSLMDVLHHPGMNHRVEITEGILADECAALLSDFFRMRRQEIKA
QKKAQSSTDSGSETPGTSESATPESDKKYSIGLAIGTNSVGWAVITDEYKVPSKKFKV
LGNTDRHSIKKNLIGALLFDSGETAEATRLKRTARRRYTRRKNRICYLQEIFSNEMAK
VDDSFFHRLEESFLVEEDKKHERHPIFGNIVDEVAYHEKYPTIYHLRKKLVDSTDKAD
LRLIYLALAHMIKFRGHFLIEGDLNPDNSDVDKLFIQLVQTYNQLFEENPINASGVDA
KAILSARLSKSRRLENLIAQLPGEKKNGLFGNLIALSLGLTPNFKSNFDLAEDAKLQLS
KDTYDDDLDNLLAQIGDQYADLFLAAKNLSDAILLSDILRVNTEITKAPLSASMIKRY
DEHHQDLTLLKALVRQQLPEKYKEIFFDQSKNGYAGYIDGGASQEEFYKFIKPILEK
MDGTEELLVKLNREDLLRKQRTFDNGSIPHQIHLGELHAILRRQEDFYPFLKDNREKI
EKILTFRIPYYVGPLARGNSRFAWMTRKSEETITPWNFEEVVDKGASAQSFIERMTNF
DKNLPNEKVLPKHSLLYEYFTVYNELTKVKYVTEGMRKPAFLSGEQKKAIVDLLFK
TNRKVTVKQLKEDYFKKIECFDSVEISGVEDRFNASLGTYHDLLKIIKDKDFLDNEEN
EDILEDIVLTLTLFEDREMIEERLKTYAHLFDDKVMKQLKRRRYTGWGRLSRKLINGI
RDKQSGKTILDFLKSDGFANRNFMQLIHDDSLTFKEDIQKAQVSGQGDSLHEHIANL
AGSPAIKKGILQTVKVVDELVKVMGRHKPENIVIEMARENQTTQKGQKNSRERMKR
IEEGIKELGSQILKEHPVENTQLQNEKLYLYYLQNGRDMYVDQELDINRLSDYDVDH
IVPQSFLKDDSIDNKVLTRSDKNRGKSDNVPSEEVVKKMKNYWRQLLNAKLITQRK
FDNLTKAERGGLSELDKAGFIKRQLVETRQITKHVAQILDSRMNTKYDENDKLIREV
KVITLKSKLVSDFRKDFQFYKVREINNYHHAHDAYLNAVVGTALIKKYPKLESEFVY
GDYKVYDVRKMIAKSEQEIGKATAKYFFYSNIMNFFKTEITLANGEIRKRPLIETNGE
TGEIVWDKGRDFATVRKVLSMPQVNIVKKTEVQTGGFSKESILPKRNSDKLIARKKD
WDPKKYGGFDSPTVAYSVLVVAKVEKGKSKKLKSVKELLGITIMERSSFEKNPIDFL
EAKGYKEVKKDLIIKLPKYSLFELENGRKRMLASAGELQKGNELALPSKYVNFLYLA
SHYEKLKGSPEDNEQKQLFVEQHKHYLDEIIEQISEFSKRVILADANLDKVLSAYNKH
RDKPIREQAENIIHLFTLTNLGAPAAFKYFDTTIDRKRYTSTKEVLDATLIHQSITGLYE
TRIDLSQLGGDSGGSPKKKRKV
ecTadA(D108N)-XTEN-nCas9-NLS: (mammalian construct, active on DNA, A to G
editing):
(SEQ ID NO: 89)
MSEVEFSHEYWMRHALTLAKRAWDEREVPVGAVLVHNNRVIGEGWNRPIGRH
DPTAHAEIMALRQGGLVMQNYRLIDATLYVTLEPCVMCAGAMIHSRIGRVVFG
ARNAKTGAAGSLMDVLHHPGMNHRVEITEGILADECAALLSDFFRMRRQEIKA
QKKAQSSTDSGSETPGTSESATPESDKKYSIGLAIGTNSVGWAVITDEYKVPSKKFKV
LGNTDRHSIKKNLIGALLFDSGETAEATRLKRTARRRYTRRKNRICYLQEIFSNEMAK
VDDSFFHRLEESFLVEEDKKHERHPIFGNIVDEVAYHEKYPTIYHLRKKLVDSTDKAD
LRLIYLALAHMIKFRGHFLIEGDLNPDNSDVDKLFIQLVQTYNQLFEENPINASGVDA
KAILSARLSKSRRLENLIAQLPGEKKNGLFGNLIALSLGLTPNFKSNEDLAEDAKLQLS
KDTYDDDLDNLLAQIGDQYADLFLAAKNLSDAILLSDILRVNTEITKAPLSASMIKRY
DEHHQDLTLLKALVRQQLPEKYKEIFFDQSKNGYAGYIDGGASQEEFYKFIKPILEK
MDGTEELLVKLNREDLLRKQRTFDNGSIPHQIHLGELHAILRRQEDFYPFLKDNREKI
EKILTFRIPYYVGPLARGNSRFAWMTRKSEETITPWNFEEVVDKGASAQSFIERMTNF
DKNLPNEKVLPKHSLLYEYFTVYNELTKVKYVTEGMRKPAFLSGEQKKAIVDLLFK
TNRKVTVKQLKEDYFKKIECFDSVEISGVEDRENASLGTYHDLLKIIKDKDFLDNEEN
EDILEDIVLTLTLFEDREMIEERLKTYAHLEDDKVMKQLKRRRYTGWGRLSRKLINGI
RDKQSGKTILDFLKSDGFANRNFMQLIHDDSLTFKEDIQKAQVSGQGDSLHEHIANL
AGSPAIKKGILQTVKVVDELVKVMGRHKPENIVIEMARENQTTQKGQKNSRERMKR
IEEGIKELGSQILKEHPVENTQLQNEKLYLYYLQNGRDMYVDQELDINRLSDYDVDH
IVPQSFLKDDSIDNKVLTRSDKNRGKSDNVPSEEVVKKMKNYWRQLLNAKLITQRK
FDNLTKAERGGLSELDKAGFIKRQLVETRQITKHVAQILDSRMNTKYDENDKLIREV
KVITLKSKLVSDFRKDFQFYKVREINNYHHAHDAYLNAVVGTALIKKYPKLESEFVY
GDYKVYDVRKMIAKSEQEIGKATAKYFFYSNIMNFFKTEITLANGEIRKRPLIETNGE
TGEIVWDKGRDFATVRKVLSMPQVNIVKKTEVQTGGFSKESILPKRNSDKLIARKKD
WDPKKYGGFDSPTVAYSVLVVAKVEKGKSKKLKSVKELLGITIMERSSFEKNPIDFL
EAKGYKEVKKDLIIKLPKYSLFELENGRKRMLASAGELQKGNELALPSKYVNFLYLA
SHYEKLKGSPEDNEQKQLFVEQHKHYLDEIIEQISEFSKRVILADANLDKVLSAYNKH
RDKPIREQAENIIHLFTLTNLGAPAAFKYFDTTIDRKRYTSTKEVLDATLIHQSITGLYE
TRIDLSQLGGDSGGSPKKKRKV
ecTadA(D108G)-XTEN-nCas9-NLS: (mammalian construct, active on DNA, A to G
editing):
(SEQ ID NO: 90)
MSEVEFSHEYWMRHALTLAKRAWDEREVPVGAVLVHNNRVIGEGWNRPIGRH
DPTAHAEIMALRQGGLVMQNYRLIDATLYVTLEPCVMCAGAMIHSRIGRVVFG
ARGAKTGAAGSLMDVLHHPGMNHRVEITEGILADECAALLSDFFRMRRQEIKA
QKKAQSSTDSGSETPGTSESATPESDKKYSIGLAIGTNSVGWAVITDEYKVPSKKFKV
LGNTDRHSIKKNLIGALLFDSGETAEATRLKRTARRRYTRRKNRICYLQEIFSNEMAK
VDDSFFHRLEESFLVEEDKKHERHPIFGNIVDEVAYHEKYPTIYHLRKKLVDSTDKAD
LRLIYLALAHMIKFRGHFLIEGDLNPDNSDVDKLFIQLVQTYNQLFEENPINASGVDA
KAILSARLSKSRRLENLIAQLPGEKKNGLFGNLIALSLGLTPNFKSNFDLAEDAKLQLS
KDTYDDDLDNLLAQIGDQYADLFLAAKNLSDAILLSDILRVNTEITKAPLSASMIKRY
DEHHQDLTLLKALVRQQLPEKYKEIFFDQSKNGYAGYIDGGASQEEFYKFIKPILEK
MDGTEELLVKLNREDLLRKQRTFDNGSIPHQIHLGELHAILRRQEDFYPFLKDNREKI
EKILTFRIPYYVGPLARGNSRFAWMTRKSEETITPWNFEEVVDKGASAQSFIERMTNF
DKNLPNEKVLPKHSLLYEYFTVYNELTKVKYVTEGMRKPAFLSGEQKKAIVDLLFK
TNRKVTVKQLKEDYFKKIECFDSVEISGVEDRENASLGTYHDLLKIIKDKDFLDNEEN
EDILEDIVLTLTLFEDREMIEERLKTYAHLEDDKVMKQLKRRRYTGWGRLSRKLINGI
RDKQSGKTILDELKSDGFANRNFMQLIHDDSLTFKEDIQKAQVSGQGDSLHEHIANL
AGSPAIKKGILQTVKVVDELVKVMGRHKPENIVIEMARENQTTQKGQKNSRERMKR
IEEGIKELGSQILKEHPVENTQLQNEKLYLYYLQNGRDMYVDQELDINRLSDYDVDH
IVPQSFLKDDSIDNKVLTRSDKNRGKSDNVPSEEVVKKMKNYWRQLLNAKLITQRK
FDNLTKAERGGLSELDKAGFIKRQLVETRQITKHVAQILDSRMNTKYDENDKLIREV
KVITLKSKLVSDFRKDFQFYKVREINNYHHAHDAYLNAVVGTALIKKYPKLESEFVY
GDYKVYDVRKMIAKSEQEIGKATAKYFFYSNIMNFFKTEITLANGEIRKRPLIETNGE
TGEIVWDKGRDFATVRKVLSMPQVNIVKKTEVQTGGFSKESILPKRNSDKLIARKKD
WDPKKYGGFDSPTVAYSVLVVAKVEKGKSKKLKSVKELLGITIMERSSFEKNPIDFL
EAKGYKEVKKDLIIKLPKYSLFELENGRKRMLASAGELQKGNELALPSKYVNFLYLA
SHYEKLKGSPEDNEQKQLFVEQHKHYLDEIIEQISEFSKRVILADANLDKVLSAYNKH
RDKPIREQAENIIHLFTLTNLGAPAAFKYFDTTIDRKRYTSTKEVLDATLIHQSITGLYE
TRIDLSQLGGDSGGSPKKKRKV
ecTadA(D108V)-XTEN-nCas9-NLS: (mammalian construct, active on DNA, A to G
editing):
(SEQ ID NO: 91)
MSEVEFSHEYWMRHALTLAKRAWDEREVPVGAVLVHNNRVIGEGWNRPIGRH
DPTAHAEIMALRQGGLVMQNYRLIDATLYVTLEPCVMCAGAMIHSRIGRVVFG
ARVAKTGAAGSLMDVLHHPGMNHRVEITEGILADECAALLSDFFRMRRQEIKA
QKKAQSSTDSGSETPGTSESATPESDKKYSIGLAIGTNSVGWAVITDEYKVPSKKFKV
LGNTDRHSIKKNLIGALLFDSGETAEATRLKRTARRRYTRRKNRICYLQEIFSNEMAK
VDDSFFHRLEESFLVEEDKKHERHPIFGNIVDEVAYHEKYPTIYHLRKKLVDSTDKAD
LRLIYLALAHMIKFRGHFLIEGDLNPDNSDVDKLFIQLVQTYNQLFEENPINASGVDA
KAILSARLSKSRRLENLIAQLPGEKKNGLFGNLIALSLGLTPNFKSNFDLAEDAKLQLS
KDTYDDDLDNLLAQIGDQYADLFLAAKNLSDAILLSDILRVNTEITKAPLSASMIKRY
DEHHQDLTLLKALVRQQLPEKYKEIFFDQSKNGYAGYIDGGASQEEFYKFIKPILEK
MDGTEELLVKLNREDLLRKQRTEDNGSIPHQIHLGELHAILRRQEDFYPFLKDNREKI
EKILTFRIPYYVGPLARGNSRFAWMTRKSEETITPWNFEEVVDKGASAQSFIERMTNE
DKNLPNEKVLPKHSLLYEYFTVYNELTKVKYVTEGMRKPAFLSGEQKKAIVDLLFK
TNRKVTVKQLKEDYFKKIECFDSVEISGVEDRFNASLGTYHDLLKIIKDKDFLDNEEN
EDILEDIVLTLTLFEDREMIEERLKTYAHLEDDKVMKQLKRRRYTGWGRLSRKLINGI
RDKQSGKTILDFLKSDGFANRNFMQLIHDDSLTFKEDIQKAQVSGQGDSLHEHIANL
AGSPAIKKGILQTVKVVDELVKVMGRHKPENIVIEMARENQTTQKGQKNSRERMKR
IEEGIKELGSQILKEHPVENTQLQNEKLYLYYLQNGRDMYVDQELDINRLSDYDVDH
IVPQSFLKDDSIDNKVLTRSDKNRGKSDNVPSEEVVKKMKNYWRQLLNAKLITQRK
FDNLTKAERGGLSELDKAGFIKRQLVETRQITKHVAQILDSRMNTKYDENDKLIREV
KVITLKSKLVSDFRKDFQFYKVREINNYHHAHDAYLNAVVGTALIKKYPKLESEFVY
GDYKVYDVRKMIAKSEQEIGKATAKYFFYSNIMNFFKTEITLANGEIRKRPLIETNGE
TGEIVWDKGRDFATVRKVLSMPQVNIVKKTEVQTGGESKESILPKRNSDKLIARKKD
WDPKKYGGFDSPTVAYSVLVVAKVEKGKSKKLKSVKELLGITIMERSSFEKNPIDFL
EAKGYKEVKKDLIIKLPKYSLFELENGRKRMLASAGELQKGNELALPSKYVNFLYLA
SHYEKLKGSPEDNEQKQLFVEQHKHYLDEIIEQISEFSKRVILADANLDKVLSAYNKH
RDKPIREQAENIIHLFTLTNLGAPAAFKYFDTTIDRKRYTSTKEVLDATLIHQSITGLYE
TRIDLSQLGGDSGGSPKKKRKV
Variant resulting from first round of evolution (in bacteria)
ecTadA (H8Y_D108N_N127S)-XTEN-dCas9:
(SEQ ID NO: 92)
MSEVEFSYEYWMRHALTLAKRAWDEREVPVGAVLVHNNRVIGEGWNRPIGRH
DPTAHAEIMALRQGGLVMQNYRLIDATLYVTLEPCVMCAGAMIHSRIGRVVFG
ARNAKTGAAGSLMDVLHHPGMSHRVEITEGILADECAALLSDFFRMRRQEIKA
QKKAQSSTDSGSETPGTSESATPESDKKYSIGLAIGTNSVGWAVITDEYKVPSKKFKV
LGNTDRHSIKKNLIGALLFDSGETAEATRLKRTARRRYTRRKNRICYLQEIFSNEMAK
VDDSFFHRLEESFLVEEDKKHERHPIFGNIVDEVAYHEKYPTIYHLRKKLVDSTDKAD
LRLIYLALAHMIKFRGHFLIEGDLNPDNSDVDKLFIQLVQTYNQLFEENPINASGVDA
KAILSARLSKSRRLENLIAQLPGEKKNGLFGNLIALSLGLTPNFKSNEDLAEDAKLQLS
KDTYDDDLDNLLAQIGDQYADLFLAAKNLSDAILLSDILRVNTEITKAPLSASMIKRY
DEHHQDLTLLKALVRQQLPEKYKEIFFDQSKNGYAGYIDGGASQEEFYKFIKPILEK
MDGTEELLVKLNREDLLRKQRTEDNGSIPHQIHLGELHAILRRQEDFYPFLKDNREKI
EKILTFRIPYYVGPLARGNSRFAWMTRKSEETITPWNFEEVVDKGASAQSFIERMTNF
DKNLPNEKVLPKHSLLYEYFTVYNELTKVKYVTEGMRKPAFLSGEQKKAIVDLLFK
TNRKVTVKQLKEDYFKKIECFDSVEISGVEDRFNASLGTYHDLLKIIKDKDELDNEEN
EDILEDIVLTLTLFEDREMIEERLKTYAHLEDDKVMKQLKRRRYTGWGRLSRKLINGI
RDKQSGKTILDFLKSDGFANRNFMQLIHDDSLTFKEDIQKAQVSGQGDSLHEHIANL
AGSPAIKKGILQTVKVVDELVKVMGRHKPENIVIEMARENQTTQKGQKNSRERMKR
IEEGIKELGSQILKEHPVENTQLQNEKLYLYYLQNGRDMYVDQELDINRLSDYDVDA
IVPQSFLKDDSIDNKVLTRSDKNRGKSDNVPSEEVVKKMKNYWRQLLNAKLITQRK
FDNLTKAERGGLSELDKAGFIKRQLVETRQITKHVAQILDSRMNTKYDENDKLIREV
KVITLKSKLVSDFRKDFQFYKVREINNYHHAHDAYLNAVVGTALIKKYPKLESEFVY
GDYKVYDVRKMIAKSEQEIGKATAKYFFYSNIMNFFKTEITLANGEIRKRPLIETNGE
TGEIVWDKGRDFATVRKVLSMPQVNIVKKTEVQTGGFSKESILPKRNSDKLIARKKD
WDPKKYGGFDSPTVAYSVLVVAKVEKGKSKKLKSVKELLGITIMERSSFEKNPIDFL
EAKGYKEVKKDLIIKLPKYSLFELENGRKRMLASAGELQKGNELALPSKYVNFLYLA
SHYEKLKGSPEDNEQKQLFVEQHKHYLDEIIEQISEFSKRVILADANLDKVLSAYNKH
RDKPIREQAENIIHLFTLTNLGAPAAFKYEDTTIDRKRYTSTKEVLDATLIHQSITGLYE
TRIDLSQLGGD
Enriched variants from second round of evolution (in bacteria) ecTadA
(H8Y_D108N_N127S_E155X)-XTEN-dCas9; X = D, G or V:
(SEQ ID NO: 93)
MSEVEFSYEYWMRHALTLAKRAWDEREVPVGAVLVHNNRVIGEGWNRPIGRH
DPTAHAEIMALRQGGLVMQNYRLIDATLYVTLEPCVMCAGAMIHSRIGRVVFG
ARNAKTGAAGSLMDVLHHPGMSHRVEITEGILADECAALLSDFFRMRRQXIKA
QKKAQSSTDSGSETPGTSESATPESDKKYSIGLAIGTNSVGWAVITDEYKVPSKKFKV
LGNTDRHSIKKNLIGALLEDSGETAEATRLKRTARRRYTRRKNRICYLQEIFSNEMAK
VDDSFFHRLEESFLVEEDKKHERHPIFGNIVDEVAYHEKYPTIYHLRKKLVDSTDKAD
LRLIYLALAHMIKFRGHFLIEGDLNPDNSDVDKLFIQLVQTYNQLFEENPINASGVDA
KAILSARLSKSRRLENLIAQLPGEKKNGLFGNLIALSLGLTPNFKSNFDLAEDAKLQLS
KDTYDDDLDNLLAQIGDQYADLFLAAKNLSDAILLSDILRVNTEITKAPLSASMIKRY
DEHHQDLTLLKALVRQQLPEKYKEIFFDQSKNGYAGYIDGGASQEEFYKFIKPILEK
MDGTEELLVKLNREDLLRKQRTFDNGSIPHQIHLGELHAILRRQEDFYPFLKDNREKI
EKILTFRIPYYVGPLARGNSRFAWMTRKSEETITPWNFEEVVDKGASAQSFIERMTNF
DKNLPNEKVLPKHSLLYEYFTVYNELTKVKYVTEGMRKPAFLSGEQKKAIVDLLFK
TNRKVTVKQLKEDYFKKIECFDSVEISGVEDRFNASLGTYHDLLKIIKDKDFLDNEEN
EDILEDIVLTLTLFEDREMIEERLKTYAHLEDDKVMKQLKRRRYTGWGRLSRKLINGI
RDKQSGKTILDFLKSDGFANRNFMQLIHDDSLTFKEDIQKAQVSGQGDSLHEHIANL
AGSPAIKKGILQTVKVVDELVKVMGRHKPENIVIEMARENQTTQKGQKNSRERMKR
IEEGIKELGSQILKEHPVENTQLQNEKLYLYYLQNGRDMYVDQELDINRLSDYDVDA
IVPQSFLKDDSIDNKVLTRSDKNRGKSDNVPSEEVVKKMKNYWRQLLNAKLITQRK
FDNLTKAERGGLSELDKAGFIKRQLVETRQITKHVAQILDSRMNTKYDENDKLIREV
KVITLKSKLVSDFRKDFQFYKVREINNYHHAHDAYLNAVVGTALIKKYPKLESEFVY
GDYKVYDVRKMIAKSEQEIGKATAKYFFYSNIMNFFKTEITLANGEIRKRPLIETNGE
TGEIVWDKGRDFATVRKVLSMPQVNIVKKTEVQTGGFSKESILPKRNSDKLIARKKD
WDPKKYGGFDSPTVAYSVLVVAKVEKGKSKKLKSVKELLGITIMERSSFEKNPIDFL
EAKGYKEVKKDLIIKLPKYSLFELENGRKRMLASAGELQKGNELALPSKYVNFLYLA
SHYEKLKGSPEDNEQKQLFVEQHKHYLDEIIEQISEFSKRVILADANLDKVLSAYNKH
RDKPIREQAENIIHLFTLTNLGAPAAFKYEDTTIDRKRYTSTKEVLDATLIHQSITGLYE
TRIDLSQLGGD
ABE7.7: ecTadA_{(wild type)}-(SGGS)₂-XTEN-(SGGS)₂-
ecTadA_{(W23L}_H36L_P48A_R51L_L84F_A106V_D108N_H123Y_S146C_D147Y_R152P_E155V_I156F_K157N)-(SGGS)₂-XTEN-
(SGGS)₂_nCas9_SGGS_NLS
(SEQ ID NO: 94)
MSEVEFSHEYWMRHALTLAKRAWDEREVPVGAVLVHNNRVIGEGWNRPIGRH
DPTAHAEIMALRQGGLVMQNYRLIDATLYVTLEPCVMCAGAMIHSRIGRVVFG
ARDAKTGAAGSLMDVLHHPGMNHRVEITEGILADECAALLSDFFRMRRQEIKA
QKKAQSSTDSGGSSGGSSGSETPGTSESATPESSGGSSGGSSEVEFSHEYWMRHALT
LAKRALDEREVPVGAVLVLNNRVIGEGWNRAIGLHDPTAHAEIMALRQGGLV
MQNYRLIDATLYVTFEPCVMCAGAMIHSRIGRVVFGVRNAKTGAAGSLMDVLH
YPGMNHRVEITEGILADECAALLCYFFRMPRQVFNAQKKAQSSTDSGGSSGGSS
GSETPGTSESATPESSGGSSGGSDKKYSIGLAIGTNSVGWAVITDEYKVPSKKFKVLGN
TDRHSIKKNLIGALLFDSGETAEATRLKRTARRRYTRRKNRICYLQEIFSNEMAKVDD
SFFHRLEESFLVEEDKKHERHPIFGNIVDEVAYHEKYPTIYHLRKKLVDSTDKADLRL
IYLALAHMIKFRGHFLIEGDLNPDNSDVDKLFIQLVQTYNQLFEENPINASGVDAKAI
LSARLSKSRRLENLIAQLPGEKKNGLFGNLIALSLGLTPNFKSNEDLAEDAKLQLSKD
TYDDDLDNLLAQIGDQYADLFLAAKNLSDAILLSDILRVNTEITKAPLSASMIKRYDE
HHQDLTLLKALVRQQLPEKYKEIFFDQSKNGYAGYIDGGASQEEFYKFIKPILEKMD
GTEELLVKLNREDLLRKQRTFDNGSIPHQIHLGELHAILRRQEDFYPFLKDNREKIEKI
LTFRIPYYVGPLARGNSRFAWMTRKSEETITPWNFEEVVDKGASAQSFIERMTNFDK
NLPNEKVLPKHSLLYEYFTVYNELTKVKYVTEGMRKPAFLSGEQKKAIVDLLFKTNR
KVTVKQLKEDYFKKIECFDSVEISGVEDRFNASLGTYHDLLKIIKDKDFLDNEENEDI
LEDIVLTLTLFEDREMIEERLKTYAHLEDDKVMKQLKRRRYTGWGRLSRKLINGIRD
KQSGKTILDFLKSDGFANRNFMQLIHDDSLTFKEDIQKAQVSGQGDSLHEHIANLAG
SPAIKKGILQTVKVVDELVKVMGRHKPENIVIEMARENQTTQKGQKNSRERMKRIEE
GIKELGSQILKEHPVENTQLQNEKLYLYYLQNGRDMYVDQELDINRLSDYDVDHIVP
QSFLKDDSIDNKVLTRSDKNRGKSDNVPSEEVVKKMKNYWRQLLNAKLITQRKFDN
LTKAERGGLSELDKAGFIKRQLVETRQITKHVAQILDSRMNTKYDENDKLIREVKVIT
LKSKLVSDFRKDFQFYKVREINNYHHAHDAYLNAVVGTALIKKYPKLESEFVYGDY
KVYDVRKMIAKSEQEIGKATAKYFFYSNIMNFFKTEITLANGEIRKRPLIETNGETGEI
VWDKGRDFATVRKVLSMPQVNIVKKTEVQTGGFSKESILPKRNSDKLIARKKDWDP
KKYGGFDSPTVAYSVLVVAKVEKGKSKKLKSVKELLGITIMERSSFEKNPIDFLEAK
GYKEVKKDLIIKLPKYSLFELENGRKRMLASAGELQKGNELALPSKYVNFLYLASHY
EKLKGSPEDNEQKQLFVEQHKHYLDEIIEQISEFSKRVILADANLDKVLSAYNKHRDK
PIREQAENIIHLFTLTNLGAPAAFKYEDTTIDRKRYTSTKEVLDATLIHQSITGLYETRI
DLSQLGGDSGGSPKKKRKV
pNMG-624 amino acid sequence: ecTadA_{(wild type)}-32 a.a. linker-
ecTadA_{(W23R}_H36L_P48A_R51L_L84F_A106V_D108N_H123Y_S146C_D147Y_R152P_E155V_1156F_K157N)-24 a.a.
linker_nCas9_SGGS_NLS
(SEQ ID NO: 95)
MSEVEFSHEYWMRHALTLAKRAWDEREVPVGAVLVHNNRVIGEGWNRPIGRH
DPTAHAEIMALRQGGLVMQNYRLIDATLYVTLEPCVMCAGAMIHSRIGRVVFG
ARDAKTGAAGSLMDVLHHPGMNHRVEITEGILADECAALLSDFFRMRRQEIKA
QKKAQSSTDSGGSSGGSSGSETPGTSESATPESSGGSSGGSSEVEFSHEYWMRHALTL
AKRARDEREVPVGAVLVLNNRVIGEGWNRAIGLHDPTAHAEIMALRQGGLVM
QNYRLIDATLYVTFEPCVMCAGAMIHSRIGRVVFGVRNAKTGAAGSLMDVLHY
PGMNHRVEITEGILADECAALLCYFFRMPRQVFNAQKKAQSSTDSGGSSGGSSGS
ETPGTSESATPESDKKYSIGLAIGTNSVGWAVITDEYKVPSKKFKVLGNTDRHSIKKNL
IGALLFDSGETAEATRLKRTARRRYTRRKNRICYLQEIFSNEMAKVDDSFFHRLEESF
LVEEDKKHERHPIFGNIVDEVAYHEKYPTIYHLRKKLVDSTDKADLRLIYLALAHMI
KFRGHFLIEGDLNPDNSDVDKLFIQLVQTYNQLFEENPINASGVDAKAILSARLSKSR
RLENLIAQLPGEKKNGLFGNLIALSLGLTPNFKSNFDLAEDAKLQLSKDTYDDDLDN
LLAQIGDQYADLFLAAKNLSDAILLSDILRVNTEITKAPLSASMIKRYDEHHQDLTLL
KALVRQQLPEKYKEIFFDQSKNGYAGYIDGGASQEEFYKFIKPILEKMDGTEELLVKL
NREDLLRKQRTFDNGSIPHQIHLGELHAILRRQEDFYPFLKDNREKIEKILTFRIPYYV
GPLARGNSRFAWMTRKSEETITPWNFEEVVDKGASAQSFIERMTNFDKNLPNEKVLP
KHSLLYEYFTVYNELTKVKYVTEGMRKPAFLSGEQKKAIVDLLFKTNRKVTVKQLK
EDYFKKIECFDSVEISGVEDRENASLGTYHDLLKIIKDKDFLDNEENEDILEDIVLTLTL
FEDREMIEERLKTYAHLEDDKVMKQLKRRRYTGWGRLSRKLINGIRDKQSGKTILDF
LKSDGFANRNFMQLIHDDSLTFKEDIQKAQVSGQGDSLHEHIANLAGSPAIKKGILQT
VKVVDELVKVMGRHKPENIVIEMARENQTTQKGQKNSRERMKRIEEGIKELGSQILK
EHPVENTQLQNEKLYLYYLQNGRDMYVDQELDINRLSDYDVDHIVPQSFLKDDSID
NKVLTRSDKNRGKSDNVPSEEVVKKMKNYWRQLLNAKLITQRKFDNLTKAERGGL
SELDKAGFIKRQLVETRQITKHVAQILDSRMNTKYDENDKLIREVKVITLKSKLVSDE
RKDFQFYKVREINNYHHAHDAYLNAVVGTALIKKYPKLESEFVYGDYKVYDVRKM
JAKSEQEIGKATAKYFFYSNIMNFFKTEITLANGEIRKRPLIETNGETGEIVWDKGRDF
ATVRKVLSMPQVNIVKKTEVQTGGFSKESILPKRNSDKLIARKKDWDPKKYGGFDSP
TVAYSVLVVAKVEKGKSKKLKSVKELLGITIMERSSFEKNPIDFLEAKGYKEVKKDLI
IKLPKYSLFELENGRKRMLASAGELQKGNELALPSKYVNFLYLASHYEKLKGSPEDN
EQKQLFVEQHKHYLDEIIEQISEFSKRVILADANLDKVLSAYNKHRDKPIREQAENIIH
LFTLTNLGAPAAFKYFDTTIDRKRYTSTKEVLDATLIHQSITGLYETRIDLSQLGGDSG
GSPKKKRKV
ABE3.2: ecTadA_{(wild-type)}-(SGGS)₂-XTEN-(SGGS)₂-
ecTadA_{(L84F}_A106V_D108N_H123Y_D147Y_E155V_I156F)-(SGGS)₂-XTEN-(SGGS)₂_nCas9_SGGS_NLS
(SEQ ID NO: 96)
MSEVEFSHEYWMRHALTLAKRAWDEREVPVGAVL VHNNRVIGEGWNRPIGRH
DPTAHAEIMALRQGGLVMQNYRLIDATLYVTLEPCVMCAGAMIHSRIGRVVFG
ARDAKTGAAGSLMDVLHHPGMNHRVEITEGILADECAALLSDFFRMRRQEIKA
QKKAQSSTDSGGSSGGSSGSETPGTSESATPESSGGSSGGSSEVEFSHEYWMRHALT
LAKRAWDEREVPVGAVLVHNNRVIGEGWNRPIGRHDPTAHAEIMALRQGGLV
MQNYRLIDATLYVTFEPCVMCAGAMIHSRIGRVVFGVRNAKTGAAGSLMDVLH
YPGMNHRVEITEGILADECAALLSYFFRMRRQVFKAQKKAQSSTDSGGSSGGSS
GSETPGTSESATPESSGGSSGGSDKKYSIGLAIGTNSVGWAVITDEYKVPSKKFKVLGN
TDRHSIKKNLIGALLFDSGETAEATRLKRTARRRYTRRKNRICYLQEIFSNEMAKVDD
SFFHRLEESFLVEEDKKHERHPIFGNIVDEVAYHEKYPTIYHLRKKLVDSTDKADLRL
IYLALAHMIKFRGHFLIEGDLNPDNSDVDKLFIQLVQTYNQLFEENPINASGVDAKAI
LSARLSKSRRLENLIAQLPGEKKNGLFGNLIALSLGLTPNFKSNEDLAEDAKLQLSKD
TYDDDLDNLLAQIGDQYADLFLAAKNLSDAILLSDILRVNTEITKAPLSASMIKRYDE
HHQDLTLLKALVRQQLPEKYKEIFFDQSKNGYAGYIDGGASQEEFYKFIKPILEKMD
GTEELLVKLNREDLLRKQRTFDNGSIPHQIHLGELHAILRRQEDFYPFLKDNREKIEKI
LTFRIPYYVGPLARGNSRFAWMTRKSEETITPWNFEEVVDKGASAQSFIERMTNFDK
NLPNEKVLPKHSLLYEYFTVYNELTKVKYVTEGMRKPAFLSGEQKKAIVDLLFKTNR
KVTVKQLKEDYFKKIECFDSVEISGVEDRENASLGTYHDLLKIIKDKDFLDNEENEDI
LEDIVLTLTLFEDREMIEERLKTYAHLEDDKVMKQLKRRRYTGWGRLSRKLINGIRD
KQSGKTILDFLKSDGFANRNFMQLIHDDSLTFKEDIQKAQVSGQGDSLHEHIANLAG
SPAIKKGILQTVKVVDELVKVMGRHKPENIVIEMARENQTTQKGQKNSRERMKRIEE
GIKELGSQILKEHPVENTQLQNEKLYLYYLQNGRDMYVDQELDINRLSDYDVDHIVP
QSFLKDDSIDNKVLTRSDKNRGKSDNVPSEEVVKKMKNYWRQLLNAKLITQRKEDN
LTKAERGGLSELDKAGFIKRQLVETRQITKHVAQILDSRMNTKYDENDKLIREVKVIT
LKSKLVSDFRKDFQFYKVREINNYHHAHDAYLNAVVGTALIKKYPKLESEFVYGDY
KVYDVRKMIAKSEQEIGKATAKYFFYSNIMNFFKTEITLANGEIRKRPLIETNGETGEI
VWDKGRDFATVRKVLSMPQVNIVKKTEVQTGGFSKESILPKRNSDKLIARKKDWDP
KKYGGFDSPTVAYSVLVVAKVEKGKSKKLKSVKELLGITIMERSSFEKNPIDFLEAK
GYKEVKKDLIIKLPKYSLFELENGRKRMLASAGELQKGNELALPSKYVNFLYLASHY
EKLKGSPEDNEQKQLFVEQHKHYLDEIIEQISEFSKRVILADANLDKVLSAYNKHRDK
PIREQAENIIHLFTLTNLGAPAAFKYFDTTIDRKRYTSTKEVLDATLIHQSITGLYETRI
DLSQLGGDSGGSPKKKRKV
ABE5.3: ecTadA_{(wild-type)}-(SGGS)₂-XTEN-(SGGS)₂-
ecTadA_{(H36L}_R51L_L84F_A106V_D108N_H123Y_S146C_D147Y_E155V_I156F_K157N)-(SGGS)₂-XTEN-
(SGGS)₂_nCas9_SGGS_NLS
(SEQ ID NO: 97)
MSEVEFSHEYWMRHALTLAKRAWDEREVPVGAVLVHNNRVIGEGWNRPIGRH
DPTAHAEIMALRQGGLVMQNYRLIDATLYVTLEPCVMCAGAMIHSRIGRVVFG
ARDAKTGAAGSLMDVLHHPGMNHRVEITEGILADECAALLSDFFRMRRQEIKA
QKKAQSSTDSGGSSGGSSGSETPGTSESATPESSGGSSGGSSEVEFSHEYWMRHALT
LAKRAWDEREVPVGAVLVLNNRVIGEGWNRPIGLHDPTAHAEIMALRQGGLV
MQNYRLIDATLYVTFEPCVMCAGAMIHSRIGRVVFGVRNAKTGAAGSLMDVLH
YPGMNHRVEITEGILADECAALLCYFFRMRRQVFNAQKKAQSSTDSGGSSGGSS
GSETPGTSESATPESSGGSSGGSDKKYSIGLAIGTNSVGWAVITDEYKVPSKKFKVLGN
TDRHSIKKNLIGALLFDSGETAEATRLKRTARRRYTRRKNRICYLQEIFSNEMAKVDD
SFFHRLEESFLVEEDKKHERHPIFGNIVDEVAYHEKYPTIYHLRKKLVDSTDKADLRL
IYLALAHMIKFRGHFLIEGDLNPDNSDVDKLFIQLVQTYNQLFEENPINASGVDAKAI
LSARLSKSRRLENLIAQLPGEKKNGLFGNLIALSLGLTPNFKSNFDLAEDAKLQLSKD
TYDDDLDNLLAQIGDQYADLFLAAKNLSDAILLSDILRVNTEITKAPLSASMIKRYDE
HHQDLTLLKALVRQQLPEKYKEIFFDQSKNGYAGYIDGGASQEEFYKFIKPILEKMD
GTEELLVKLNREDLLRKQRTFDNGSIPHQIHLGELHAILRRQEDFYPFLKDNREKIEKI
LTFRIPYYVGPLARGNSRFAWMTRKSEETITPWNFEEVVDKGASAQSFIERMTNEDK
NLPNEKVLPKHSLLYEYFTVYNELTKVKYVTEGMRKPAFLSGEQKKAIVDLLFKTNR
KVTVKQLKEDYFKKIECFDSVEISGVEDRFNASLGTYHDLLKIIKDKDELDNEENEDI
LEDIVLTLTLFEDREMIEERLKTYAHLFDDKVMKQLKRRRYTGWGRLSRKLINGIRD
KQSGKTILDFLKSDGFANRNFMQLIHDDSLTFKEDIQKAQVSGQGDSLHEHIANLAG
SPAIKKGILQTVKVVDELVKVMGRHKPENIVIEMARENQTTQKGQKNSRERMKRIEE
GIKELGSQILKEHPVENTQLQNEKLYLYYLQNGRDMYVDQELDINRLSDYDVDHIVP
QSFLKDDSIDNKVLTRSDKNRGKSDNVPSEEVVKKMKNYWRQLLNAKLITQRKEDN
LTKAERGGLSELDKAGFIKRQLVETRQITKHVAQILDSRMNTKYDENDKLIREVKVIT
LKSKLVSDFRKDFQFYKVREINNYHHAHDAYLNAVVGTALIKKYPKLESEFVYGDY
KVYDVRKMIAKSEQEIGKATAKYFFYSNIMNFFKTEITLANGEIRKRPLIETNGETGEI
VWDKGRDFATVRKVLSMPQVNIVKKTEVQTGGFSKESILPKRNSDKLIARKKDWDP
KKYGGFDSPTVAYSVLVVAKVEKGKSKKLKSVKELLGITIMERSSFEKNPIDFLEAK
GYKEVKKDLIIKLPKYSLFELENGRKRMLASAGELQKGNELALPSKYVNFLYLASHY
EKLKGSPEDNEQKQLFVEQHKHYLDEIIEQISEFSKRVILADANLDKVLSAYNKHRDK
PIREQAENIIHLFTLTNLGAPAAFKYFDTTIDRKRYTSTKEVLDATLIHQSITGLYETRI
DLSQLGGDSGGSPKKKRKV
pNMG-558 amino acid sequence: ecTadA_{(wild-type)}-32 a.a. linker-
ecTadA_{(H36L}_R51L_L84F_A106V_D108N_H123Y_S146C_D147Y_E155V_I156F_K157N)-24 a.a.
linker_nCas9_SGGS_NLS
(SEQ ID NO: 98)
MSEVEFSHEYWMRHALTLAKRAWDEREVPVGAVLVHNNRVIGEGWNRPIGRH
DPTAHAEIMALRQGGLVMQNYRLIDATLYVTLEPCVMCAGAMIHSRIGRVVFG
ARDAKTGAAGSLMDVLHHPGMNHRVEITEGILADECAALLSDFFRMRRQEIKA
QKKAQSSTDSGGSSGGSSGSETPGTSESATPESSGGSSGGSSEVEFSHEYWMRHALTL
AKRAWDEREVPVGAVLVLNNRVIGEGWNRPIGLHDPTAHAEIMALRQGGLVM
QNYRLIDATLYVTFEPCVMCAGAMIHSRIGRVVFGVRNAKTGAAGSLMDVLHY
PGMNHRVEITEGILADECAALLCYFFRMRRQVFNAQKKAQSSTDSGGSSGGSSGS
ETPGTSESATPESDKKYSIGLAIGTNSVGWAVITDEYKVPSKKFKVLGNTDRHSIKKNL
IGALLFDSGETAEATRLKRTARRRYTRRKNRICYLQEIFSNEMAKVDDSFFHRLEESF
LVEEDKKHERHPIFGNIVDEVAYHEKYPTIYHLRKKLVDSTDKADLRLIYLALAHMI
KFRGHFLIEGDLNPDNSDVDKLFIQLVQTYNQLFEENPINASGVDAKAILSARLSKSR
RLENLIAQLPGEKKNGLFGNLIALSLGLTPNFKSNFDLAEDAKLQLSKDTYDDDLDN
LLAQIGDQYADLFLAAKNLSDAILLSDILRVNTEITKAPLSASMIKRYDEHHQDLTLL
KALVRQQLPEKYKEIFFDQSKNGYAGYIDGGASQEEFYKFIKPILEKMDGTEELLVKL
NREDLLRKQRTEDNGSIPHQIHLGELHAILRRQEDFYPFLKDNREKIEKILTFRIPYYV
GPLARGNSRFAWMTRKSEETITPWNFEEVVDKGASAQSFIERMTNFDKNLPNEKVLP
KHSLLYEYFTVYNELTKVKYVTEGMRKPAFLSGEQKKAIVDLLFKTNRKVTVKQLK
EDYFKKIECFDSVEISGVEDRFNASLGTYHDLLKIIKDKDFLDNEENEDILEDIVLTLTL
FEDREMIEERLKTYAHLFDDKVMKQLKRRRYTGWGRLSRKLINGIRDKQSGKTILDF
LKSDGFANRNFMQLIHDDSLTFKEDIQKAQVSGQGDSLHEHIANLAGSPAIKKGILQT
VKVVDELVKVMGRHKPENIVIEMARENQTTQKGQKNSRERMKRIEEGIKELGSQILK
EHPVENTQLQNEKLYLYYLQNGRDMYVDQELDINRLSDYDVDHIVPQSFLKDDSID
NKVLTRSDKNRGKSDNVPSEEVVKKMKNYWRQLLNAKLITQRKEDNLTKAERGGL
SELDKAGFIKRQLVETRQITKHVAQILDSRMNTKYDENDKLIREVKVITLKSKLVSDF
RKDFQFYKVREINNYHHAHDAYLNAVVGTALIKKYPKLESEFVYGDYKVYDVRKM
IAKSEQEIGKATAKYFFYSNIMNFFKTEITLANGEIRKRPLIETNGETGEIVWDKGRDF
ATVRKVLSMPQVNIVKKTEVQTGGFSKESILPKRNSDKLIARKKDWDPKKYGGFDSP
TVAYSVLVVAKVEKGKSKKLKSVKELLGITIMERSSFEKNPIDFLEAKGYKEVKKDLI
IKLPKYSLFELENGRKRMLASAGELQKGNELALPSKYVNFLYLASHYEKLKGSPEDN
EQKQLFVEQHKHYLDEIIEQISEFSKRVILADANLDKVLSAYNKHRDKPIREQAENIIH
LFTLTNLGAPAAFKYFDTTIDRKRYTSTKEVLDATLIHQSITGLYETRIDLSQLGGDSG
GSPKKKRKV
pNMG-576 amino acid sequence: ecTadA_{(wild-type)}-(SGGS)₂-XTEN-(SGGS)₂-
ecTadA_{(H36L}_P48S_R51L_L84F_A106V_D108N_H123Y_S146C_D147Y_E155V_I156F_K157N)-(SGGS)₂-XTEN-
(SGGS)₂_nCas9_GGS_NLS
(SEQ ID NO: 99)
MSEVEFSHEYWMRHALTLAKRAWDEREVPVGAVLVHNNRVIGEGWNRPIGRH
DPTAHAEIMALRQGGLVMQNYRLIDATLYVTLEPCVMCAGAMIHSRIGRVVFG
ARDAKTGAAGSLMDVLHHPGMNHRVEITEGILADECAALLSDFFRMRRQEIKA
QKKAQSSTDSGGSSGGSSGSETPGTSESATPESSGGSSGGSSEVEFSHEYWMRHALT
LAKRAWDEREVPVGAVLVLNNRVIGEGWNRSIGLHDPTAHAEIMALRQGGLV
MQNYRLIDATLYVTFEPCVMCAGAMIHSRIGRVVFGVRNAKTGAAGSLMDVLH
YPGMNHRVEITEGILADECAALLCYFFRMRRQVFNAQKKAQSSTDSGGSSGGSS
GSETPGTSESATPESSGGSSGGSDKKYSIGLAIGTNSVGWAVITDEYKVPSKKFKVLGN
TDRHSIKKNLIGALLFDSGETAEATRLKRTARRRYTRRKNRICYLQEIFSNEMAKVDD
SFFHRLEESFLVEEDKKHERHPIFGNIVDEVAYHEKYPTIYHLRKKLVDSTDKADLRL
IYLALAHMIKFRGHFLIEGDLNPDNSDVDKLFIQLVQTYNQLFEENPINASGVDAKAI
LSARLSKSRRLENLIAQLPGEKKNGLFGNLIALSLGLTPNFKSNFDLAEDAKLQLSKD
TYDDDLDNLLAQIGDQYADLFLAAKNLSDAILLSDILRVNTEITKAPLSASMIKRYDE
HHQDLTLLKALVRQQLPEKYKEIFFDQSKNGYAGYIDGGASQEEFYKFIKPILEKMD
GTEELLVKLNREDLLRKQRTFDNGSIPHQIHLGELHAILRRQEDFYPFLKDNREKIEKI
LTFRIPYYVGPLARGNSRFAWMTRKSEETITPWNFEEVVDKGASAQSFIERMTNEDK
NLPNEKVLPKHSLLYEYFTVYNELTKVKYVTEGMRKPAFLSGEQKKAIVDLLEKTNR
KVTVKQLKEDYFKKIECFDSVEISGVEDRENASLGTYHDLLKIIKDKDFLDNEENEDI
LEDIVLTLTLFEDREMIEERLKTYAHLEDDKVMKQLKRRRYTGWGRLSRKLINGIRD
KQSGKTILDFLKSDGFANRNFMQLIHDDSLTFKEDIQKAQVSGQGDSLHEHIANLAG
SPAIKKGILQTVKVVDELVKVMGRHKPENIVIEMARENQTTQKGQKNSRERMKRIEE
GIKELGSQILKEHPVENTQLQNEKLYLYYLQNGRDMYVDQELDINRLSDYDVDHIVP
QSFLKDDSIDNKVLTRSDKNRGKSDNVPSEEVVKKMKNYWRQLLNAKLITQRKFDN
LTKAERGGLSELDKAGFIKRQLVETRQITKHVAQILDSRMNTKYDENDKLIREVKVIT
LKSKLVSDFRKDFQFYKVREINNYHHAHDAYLNAVVGTALIKKYPKLESEFVYGDY
KVYDVRKMIAKSEQEIGKATAKYFFYSNIMNFFKTEITLANGEIRKRPLIETNGETGEI
VWDKGRDFATVRKVLSMPQVNIVKKTEVQTGGFSKESILPKRNSDKLIARKKDWDP
KKYGGFDSPTVAYSVLVVAKVEKGKSKKLKSVKELLGITIMERSSFEKNPIDFLEAK
GYKEVKKDLIIKLPKYSLFELENGRKRMLASAGELQKGNELALPSKYVNFLYLASHY
EKLKGSPEDNEQKQLFVEQHKHYLDEIIEQISEFSKRVILADANLDKVLSAYNKHRDK
PIREQAENIIHLFTLTNLGAPAAFKYFDTTIDRKRYTSTKEVLDATLIHQSITGLYETRI
DLSQLGGDSGGSPKKKRKV
pNMG-577 amino acid sequence: ecTadA_{(wild-type)}-(SGGS)₂-XTEN-(SGGS)₂-
ecTadA_{(H36L}_P48S_R51L_L84F_A106V_D108N_H123Y_A142N_S146C_D147Y_E155V_I156F_K157N)-(SGGS)₂-
XTEN-(SGGS)₂_nCas9_GGS_NLS
(SEQ ID NO: 100)
MSEVEFSHEYWMRHALTLAKRAWDEREVPVGAVLVHNNRVIGEGWNRPIGRH
DPTAHAEIMALRQGGLVMQNYRLIDATLYVTLEPCVMCAGAMIHSRIGRVVFG
ARDAKTGAAGSLMDVLHHPGMNHRVEITEGILADECAALLSDFFRMRRQEIKA
QKKAQSSTDSGGSSGGSSGSETPGTSESATPESSGGSSGGSSEVEFSHEYWMRHALT
LAKRAWDEREVPVGAVLVLNNRVIGEGWNRSIGLHDPTAHAEIMALRQGGLV
MQNYRLIDATLYVTFEPCVMCAGAMIHSRIGRVVFGVRNAKTGAAGSLMDVLH
YPGMNHRVEITEGILADECNALLCYFFRMRRQVFNAQKKAQSSTDSGGSSGGSS
GSETPGTSESATPESSGGSSGGSDKKYSIGLAIGTNSVGWAVITDEYKVPSKKFKVLGN
TDRHSIKKNLIGALLEDSGETAEATRLKRTARRRYTRRKNRICYLQEIFSNEMAKVDD
SFFHRLEESFLVEEDKKHERHPIFGNIVDEVAYHEKYPTIYHLRKKLVDSTDKADLRL
IYLALAHMIKFRGHFLIEGDLNPDNSDVDKLFIQLVQTYNQLFEENPINASGVDAKAI
LSARLSKSRRLENLIAQLPGEKKNGLFGNLIALSLGLTPNFKSNFDLAEDAKLQLSKD
TYDDDLDNLLAQIGDQYADLFLAAKNLSDAILLSDILRVNTEITKAPLSASMIKRYDE
HHQDLTLLKALVRQQLPEKYKEIFFDQSKNGYAGYIDGGASQEEFYKFIKPILEKMD
GTEELLVKLNREDLLRKQRTFDNGSIPHQIHLGELHAILRRQEDFYPFLKDNREKIEKI
LTFRIPYYVGPLARGNSRFAWMTRKSEETITPWNFEEVVDKGASAQSFIERMTNFDK
NLPNEKVLPKHSLLYEYFTVYNELTKVKYVTEGMRKPAFLSGEQKKAIVDLLFKTNR
KVTVKQLKEDYFKKIECFDSVEISGVEDRFNASLGTYHDLLKIIKDKDFLDNEENEDI
LEDIVLTLTLFEDREMIEERLKTYAHLEDDKVMKQLKRRRYTGWGRLSRKLINGIRD
KQSGKTILDFLKSDGFANRNFMQLIHDDSLTFKEDIQKAQVSGQGDSLHEHIANLAG
SPAIKKGILQTVKVVDELVKVMGRHKPENIVIEMARENQTTQKGQKNSRERMKRIEE
GIKELGSQILKEHPVENTQLQNEKLYLYYLQNGRDMYVDQELDINRLSDYDVDHIVP
QSFLKDDSIDNKVLTRSDKNRGKSDNVPSEEVVKKMKNYWRQLLNAKLITQRKFDN
LTKAERGGLSELDKAGFIKRQLVETRQITKHVAQILDSRMNTKYDENDKLIREVKVIT
LKSKLVSDFRKDFQFYKVREINNYHHAHDAYLNAVVGTALIKKYPKLESEFVYGDY
KVYDVRKMIAKSEQEIGKATAKYFFYSNIMNFFKTEITLANGEIRKRPLIETNGETGEI
VWDKGRDFATVRKVLSMPQVNIVKKTEVQTGGFSKESILPKRNSDKLIARKKDWDP
KKYGGEDSPTVAYSVLVVAKVEKGKSKKLKSVKELLGITIMERSSFEKNPIDFLEAK
GYKEVKKDLIIKLPKYSLFELENGRKRMLASAGELQKGNELALPSKYVNFLYLASHY
EKLKGSPEDNEQKQLFVEQHKHYLDEIIEQISEFSKRVILADANLDKVLSAYNKHRDK
PIREQAENIIHLFTLTNLGAPAAFKYEDTTIDRKRYTSTKEVLDATLIHQSITGLYETRI
DLSQLGGDSGGSPKKKRKV
pNMG-586 amino acid sequence: ecTadA_{(wild-type)}-(SGGS)₂-XTEN-(SGGS)₂-
ecTadA_{(H36L}_P48A_R51L_L84F_A106V_D108N_H123Y_S146C_D147Y_E155V_I156F_K157N)-(SGGS)₂-XTEN-
(SGGS)₂_nCas9_GGS_NLS
(SEQ ID NO: 101)
MSEVEFSHEYWMRHALTLAKRAWDEREVPVGAVLVHNNRVIGEGWNRPIGRH
DPTAHAEIMALRQGGLVMQNYRLIDATLYVTLEPCVMCAGAMIHSRIGRVVFG
ARDAKTGAAGSLMDVLHHPGMNHRVEITEGILADECAALLSDFFRMRRQEIKA
QKKAQSSTDSGGSSGGSSGSETPGTSESATPESSGGSSGGSSEVEFSHEYWMRHALT
LAKRAWDEREVPVGAVLVLNNRVIGEGWNRAIGLHDPTAHAEIMALRQGGLV
MQNYRLIDATLYVTFEPCVMCAGAMIHSRIGRVVFGVRNAKTGAAGSLMDVLH
YPGMNHRVEITEGILADECAALLCYFFRMRRQVFNAQKKAQSSTDSGGSSGGSS
GSETPGTSESATPESSGGSSGGSDKKYSIGLAIGTNSVGWAVITDEYKVPSKKFKVLGN
TDRHSIKKNLIGALLFDSGETAEATRLKRTARRRYTRRKNRICYLQEIFSNEMAKVDD
SFFHRLEESFLVEEDKKHERHPIFGNIVDEVAYHEKYPTIYHLRKKLVDSTDKADLRL
IYLALAHMIKFRGHFLIEGDLNPDNSDVDKLFIQLVQTYNQLFEENPINASGVDAKAI
LSARLSKSRRLENLIAQLPGEKKNGLFGNLIALSLGLTPNFKSNFDLAEDAKLQLSKD
TYDDDLDNLLAQIGDQYADLFLAAKNLSDAILLSDILRVNTEITKAPLSASMIKRYDE
HHQDLTLLKALVRQQLPEKYKEIFFDQSKNGYAGYIDGGASQEEFYKFIKPILEKMD
GTEELLVKLNREDLLRKQRTFDNGSIPHQIHLGELHAILRRQEDFYPFLKDNREKIEKI
LTFRIPYYVGPLARGNSRFAWMTRKSEETITPWNFEEVVDKGASAQSFIERMTNFDK
NLPNEKVLPKHSLLYEYFTVYNELTKVKYVTEGMRKPAFLSGEQKKAIVDLLFKTNR
KVTVKQLKEDYFKKIECFDSVEISGVEDRFNASLGTYHDLLKIIKDKDFLDNEENEDI
LEDIVLTLTLFEDREMIEERLKTYAHLEDDKVMKQLKRRRYTGWGRLSRKLINGIRD
KQSGKTILDFLKSDGFANRNFMQLIHDDSLTFKEDIQKAQVSGQGDSLHEHIANLAG
SPAIKKGILQTVKVVDELVKVMGRHKPENIVIEMARENQTTQKGQKNSRERMKRIEE
GIKELGSQILKEHPVENTQLQNEKLYLYYLQNGRDMYVDQELDINRLSDYDVDHIVP
QSFLKDDSIDNKVLTRSDKNRGKSDNVPSEEVVKKMKNYWRQLLNAKLITQRKEDN
LTKAERGGLSELDKAGFIKRQLVETRQITKHVAQILDSRMNTKYDENDKLIREVKVIT
LKSKLVSDFRKDFQFYKVREINNYHHAHDAYLNAVVGTALIKKYPKLESEFVYGDY
KVYDVRKMIAKSEQEIGKATAKYFFYSNIMNFFKTEITLANGEIRKRPLIETNGETGEI
VWDKGRDFATVRKVLSMPQVNIVKKTEVQTGGFSKESILPKRNSDKLIARKKDWDP
KKYGGFDSPTVAYSVLVVAKVEKGKSKKLKSVKELLGITIMERSSFEKNPIDFLEAK
GYKEVKKDLIIKLPKYSLFELENGRKRMLASAGELQKGNELALPSKYVNFLYLASHY
EKLKGSPEDNEQKQLFVEQHKHYLDEIIEQISEFSKRVILADANLDKVLSAYNKHRDK
PIREQAENIIHLFTLTNLGAPAAFKYFDTTIDRKRYTSTKEVLDATLIHQSITGLYETRI
DLSQLGGDSGGSPKKKRKV
ABE7.2: ecTadA_{(wild-type)}-(SGGS)₂-XTEN-(SGGS)₂-
ecTadA_{(H36L}_P48A_R51L_L84F_A106V_D108N_H123Y_A142N_S146C_D147Y_E155V_I156F_K157N)-(SGGS)₂-
XTEN-(SGGS)₂_nCas9_GGS_NLS
(SEQ ID NO: 102)
MSEVEFSHEYWMRHALTLAKRAWDEREVPVGAVLVHNNRVIGEGWNRPIGRH
DPTAHAEIMALRQGGLVMQNYRLIDATLYVTLEPCVMCAGAMIHSRIGRVVFG
ARDAKTGAAGSLMDVLHHPGMNHRVEITEGILADECAALLSDFFRMRRQEIKA
QKKAQSSTDSGGSSGGSSGSETPGTSESATPESSGGSSGGSSEVEFSHEYWMRHALT
LAKRAWDEREVPVGAVLVLNNRVIGEGWNRAIGLHDPTAHAEIMALRQGGLV
MQNYRLIDATLYVTFEPCVMCAGAMIHSRIGRVVFGVRNAKTGAAGSLMDVLH
YPGMNHRVEITEGILADECNALLCYFFRMRRQVFNAQKKAQSSTDSGGSSGGSS
GSETPGTSESATPESSGGSSGGSDKKYSIGLAIGTNSVGWAVITDEYKVPSKKFKVLGN
TDRHSIKKNLIGALLFDSGETAEATRLKRTARRRYTRRKNRICYLQEIFSNEMAKVDD
SFFHRLEESFLVEEDKKHERHPIFGNIVDEVAYHEKYPTIYHLRKKLVDSTDKADLRL
IYLALAHMIKFRGHFLIEGDLNPDNSDVDKLFIQLVQTYNQLFEENPINASGVDAKAI
LSARLSKSRRLENLIAQLPGEKKNGLFGNLIALSLGLTPNFKSNFDLAEDAKLQLSKD
TYDDDLDNLLAQIGDQYADLFLAAKNLSDAILLSDILRVNTEITKAPLSASMIKRYDE
HHQDLTLLKALVRQQLPEKYKEIFFDQSKNGYAGYIDGGASQEEFYKFIKPILEKMD
GTEELLVKLNREDLLRKQRTFDNGSIPHQIHLGELHAILRRQEDFYPFLKDNREKIEKI
LTFRIPYYVGPLARGNSRFAWMTRKSEETITPWNFEEVVDKGASAQSFIERMTNFDK
NLPNEKVLPKHSLLYEYFTVYNELTKVKYVTEGMRKPAFLSGEQKKAIVDLLFKTNR
KVTVKQLKEDYFKKIECFDSVEISGVEDRFNASLGTYHDLLKIIKDKDFLDNEENEDI
LEDIVLTLTLFEDREMIEERLKTYAHLFDDKVMKQLKRRRYTGWGRLSRKLINGIRD
KQSGKTILDFLKSDGFANRNFMQLIHDDSLTFKEDIQKAQVSGQGDSLHEHIANLAG
SPAIKKGILQTVKVVDELVKVMGRHKPENIVIEMARENQTTQKGQKNSRERMKRIEE
GIKELGSQILKEHPVENTQLQNEKLYLYYLQNGRDMYVDQELDINRLSDYDVDHIVP
QSFLKDDSIDNKVLTRSDKNRGKSDNVPSEEVVKKMKNYWRQLLNAKLITQRKFDN
LTKAERGGLSELDKAGFIKRQLVETRQITKHVAQILDSRMNTKYDENDKLIREVKVIT
LKSKLVSDFRKDFQFYKVREINNYHHAHDAYLNAVVGTALIKKYPKLESEFVYGDY
KVYDVRKMIAKSEQEIGKATAKYFFYSNIMNFFKTEITLANGEIRKRPLIETNGETGEI
VWDKGRDFATVRKVLSMPQVNIVKKTEVQTGGFSKESILPKRNSDKLIARKKDWDP
KKYGGFDSPTVAYSVLVVAKVEKGKSKKLKSVKELLGITIMERSSFEKNPIDFLEAK
GYKEVKKDLIIKLPKYSLFELENGRKRMLASAGELQKGNELALPSKYVNFLYLASHY
EKLKGSPEDNEQKQLFVEQHKHYLDEIIEQISEFSKRVILADANLDKVLSAYNKHRDK
PIREQAENIIHLFTLTNLGAPAAFKYFDTTIDRKRYTSTKEVLDATLIHQSITGLYETRI
DLSQLGGDSGGSPKKKRKV
pNMG-620 amino acid sequence: ecTadA_{(wild-type)}-(SGGS)₂-XTEN-(SGGS)₂-
ecTadA_{(W23R}_H36L_P48A_R51L_L84F_A106V_D108N_H123Y_S146C_D147Y_R152P_E155V_I156F_K157N)-
(SGGS)₂-XTEN-(SGGS)₂_nCas9_GGS_NLS
(SEQ ID NO: 103)
MSEVEFSHEYWMRHALTLAKRAWDEREVPVGAVLVHNNRVIGEGWNRPIGRH
DPTAHAEIMALRQGGLVMQNYRLIDATLYVTLEPCVMCAGAMIHSRIGRVVFG
ARDAKTGAAGSLMDVLHHPGMNHRVEITEGILADECAALLSDFFRMRRQEIKA
QKKAQSSTDSGGSSGGSSGSETPGTSESATPESSGGSSGGSSEVEFSHEYWMRHALT
LAKRARDEREVPVGAVLVLNNRVIGEGWNRAIGLHDPTAHAEIMALRQGGLV
MQNYRLIDATLYVTFEPCVMCAGAMIHSRIGRVVFGVRNAKTGAAGSLMDVLH
YPGMNHRVEITEGILADECAALLCYFFRMPRQVFNAQKKAQSSTDSGGSSGGSS
GSETPGTSESATPESSGGSSGGSDKKYSIGLAIGTNSVGWAVITDEYKVPSKKFKVLGN
TDRHSIKKNLIGALLFDSGETAEATRLKRTARRRYTRRKNRICYLQEIFSNEMAKVDD
SFFHRLEESFLVEEDKKHERHPIFGNIVDEVAYHEKYPTIYHLRKKLVDSTDKADLRL
IYLALAHMIKFRGHFLIEGDLNPDNSDVDKLFIQLVQTYNQLFEENPINASGVDAKAI
LSARLSKSRRLENLIAQLPGEKKNGLFGNLIALSLGLTPNFKSNFDLAEDAKLQLSKD
TYDDDLDNLLAQIGDQYADLFLAAKNLSDAILLSDILRVNTEITKAPLSASMIKRYDE
HHQDLTLLKALVRQQLPEKYKEIFFDQSKNGYAGYIDGGASQEEFYKFIKPILEKMD
GTEELLVKLNREDLLRKQRTFDNGSIPHQIHLGELHAILRRQEDFYPFLKDNREKIEKI
LTFRIPYYVGPLARGNSRFAWMTRKSEETITPWNFEEVVDKGASAQSFIERMTNFDK
NLPNEKVLPKHSLLYEYFTVYNELTKVKYVTEGMRKPAFLSGEQKKAIVDLLFKTNR
KVTVKQLKEDYFKKIECFDSVEISGVEDRFNASLGTYHDLLKIIKDKDFLDNEENEDI
LEDIVLTLTLFEDREMIEERLKTYAHLEDDKVMKQLKRRRYTGWGRLSRKLINGIRD
KQSGKTILDFLKSDGFANRNFMQLIHDDSLTFKEDIQKAQVSGQGDSLHEHIANLAG
SPAIKKGILQTVKVVDELVKVMGRHKPENIVIEMARENQTTQKGQKNSRERMKRIEE
GIKELGSQILKEHPVENTQLQNEKLYLYYLQNGRDMYVDQELDINRLSDYDVDHIVP
QSFLKDDSIDNKVLTRSDKNRGKSDNVPSEEVVKKMKNYWRQLLNAKLITQRKEDN
LTKAERGGLSELDKAGFIKRQLVETRQITKHVAQILDSRMNTKYDENDKLIREVKVIT
LKSKLVSDFRKDFQFYKVREINNYHHAHDAYLNAVVGTALIKKYPKLESEFVYGDY
KVYDVRKMIAKSEQEIGKATAKYFFYSNIMNFFKTEITLANGEIRKRPLIETNGETGEI
VWDKGRDFATVRKVLSMPQVNIVKKTEVQTGGFSKESILPKRNSDKLIARKKDWDP
KKYGGFDSPTVAYSVLVVAKVEKGKSKKLKSVKELLGITIMERSSFEKNPIDFLEAK
GYKEVKKDLIIKLPKYSLFELENGRKRMLASAGELQKGNELALPSKYVNFLYLASHY
EKLKGSPEDNEQKQLFVEQHKHYLDEIIEQISEFSKRVILADANLDKVLSAYNKHRDK
PIREQAENIIHLFTLTNLGAPAAFKYFDTTIDRKRYTSTKEVLDATLIHQSITGLYETRI
DLSQLGGDSGGSPKKKRKV
pNMG-617 amino acid sequence: ecTadA_{(wild-type)}-(SGGS)₂-XTEN-(SGGS)₂-
ecTadA_{(W23L}_H36L_P48A_R51L_L84F_A106V_D108N_H123Y_A142A_S146C_D147Y_E155V_I156F_K157N)-
(SGGS)₂-XTEN-(SGGS)₂_nCas9_GGS_NLS
(SEQ ID NO: 104)
MSEVEFSHEYWMRHALTLAKRAWDEREVPVGAVLVHNNRVIGEGWNRPIGRH
DPTAHAEIMALRQGGLVMQNYRLIDATLYVTLEPCVMCAGAMIHSRIGRVVFG
ARDAKTGAAGSLMDVLHHPGMNHRVEITEGILADECAALLSDFFRMRRQEIKA
QKKAQSSTDSGGSSGGSSGSETPGTSESATPESSGGSSGGSSEVEFSHEYWMRHALT
LAKRALDEREVPVGAVLVLNNRVIGEGWNRAIGLHDPTAHAEIMALRQGGLV
MQNYRLIDATLYVTFEPCVMCAGAMIHSRIGRVVFGVRNAKTGAAGSLMDVLH
YPGMNHRVEITEGILADECNALLCYFFRMRRQVFNAQKKAQSSTDSGGSSGGSS
GSETPGTSESATPESSGGSSGGSDKKYSIGLAIGTNSVGWAVITDEYKVPSKKFKVLGN
TDRHSIKKNLIGALLFDSGETAEATRLKRTARRRYTRRKNRICYLQEIFSNEMAKVDD
SFFHRLEESFLVEEDKKHERHPIFGNIVDEVAYHEKYPTIYHLRKKLVDSTDKADLRL
IYLALAHMIKFRGHFLIEGDLNPDNSDVDKLFIQLVQTYNQLFEENPINASGVDAKAI
LSARLSKSRRLENLIAQLPGEKKNGLFGNLIALSLGLTPNFKSNEDLAEDAKLQLSKD
TYDDDLDNLLAQIGDQYADLFLAAKNLSDAILLSDILRVNTEITKAPLSASMIKRYDE
HHQDLTLLKALVRQQLPEKYKEIFFDQSKNGYAGYIDGGASQEEFYKFIKPILEKMD
GTEELLVKLNREDLLRKQRTEDNGSIPHQIHLGELHAILRRQEDFYPFLKDNREKIEKI
LTFRIPYYVGPLARGNSRFAWMTRKSEETITPWNFEEVVDKGASAQSFIERMTNEDK
NLPNEKVLPKHSLLYEYFTVYNELTKVKYVTEGMRKPAFLSGEQKKAIVDLLFKTNR
KVTVKQLKEDYFKKIECFDSVEISGVEDRFNASLGTYHDLLKIIKDKDFLDNEENEDI
LEDIVLTLTLFEDREMIEERLKTYAHLEDDKVMKQLKRRRYTGWGRLSRKLINGIRD
KQSGKTILDFLKSDGFANRNFMQLIHDDSLTFKEDIQKAQVSGQGDSLHEHIANLAG
SPAIKKGILQTVKVVDELVKVMGRHKPENIVIEMARENQTTQKGQKNSRERMKRIEE
GIKELGSQILKEHPVENTQLQNEKLYLYYLQNGRDMYVDQELDINRLSDYDVDHIVP
QSFLKDDSIDNKVLTRSDKNRGKSDNVPSEEVVKKMKNYWRQLLNAKLITQRKFDN
LTKAERGGLSELDKAGFIKRQLVETRQITKHVAQILDSRMNTKYDENDKLIREVKVIT
LKSKLVSDFRKDFQFYKVREINNYHHAHDAYLNAVVGTALIKKYPKLESEFVYGDY
KVYDVRKMIAKSEQEIGKATAKYFFYSNIMNFFKTEITLANGEIRKRPLIETNGETGEI
VWDKGRDFATVRKVLSMPQVNIVKKTEVQTGGESKESILPKRNSDKLIARKKDWDP
KKYGGFDSPTVAYSVLVVAKVEKGKSKKLKSVKELLGITIMERSSFEKNPIDFLEAK
GYKEVKKDLIIKLPKYSLFELENGRKRMLASAGELQKGNELALPSKYVNFLYLASHY
EKLKGSPEDNEQKQLFVEQHKHYLDEIIEQISEFSKRVILADANLDKVLSAYNKHRDK
PIREQAENIIHLFTLTNLGAPAAFKYFDTTIDRKRYTSTKEVLDATLIHQSITGLYETRI
DLSQLGGDSGGSPKKKRKV
pNMG-618 amino acid sequence: ecTadA_{(wild-type)}-(SGGS)₂-XTEN-(SGGS)₂-
ecTadA_{(W23L}_H36L_P48A_R51L_L84F_A106V_D108N_H123Y_A142A_S146C_D147Y_R152P_E155V_I156F_K157N)-
(SGGS)₂-XTEN-(SGGS)₂_nCas9_GGS_NLS
(SEQ ID NO: 105)
MSEVEFSHEYWMRHALTLAKRAWDEREVPVGAVLVHNNRVIGEGWNRPIGRH
DPTAHAEIMALRQGGLVMQNYRLIDATLYVTLEPCVMCAGAMIHSRIGRVVFG
ARDAKTGAAGSLMDVLHHPGMNHRVEITEGILADECAALLSDFFRMRRQEIKA
QKKAQSSTDSGGSSGGSSGSETPGTSESATPESSGGSSGGSSEVEFSHEYWMRHALT
LAKRALDEREVPVGAVLVLNNRVIGEGWNRAIGLHDPTAHAEIMALRQGGLV
MQNYRLIDATLYVTFEPCVMCAGAMIHSRIGRVVFGVRNAKTGAAGSLMDVLH
YPGMNHRVEITEGILADECNALLCYFFRMPRQVFNAQKKAQSSTDSGGSSGGSS
GSETPGTSESATPESSGGSSGGSDKKYSIGLAIGTNSVGWAVITDEYKVPSKKFKVLGN
TDRHSIKKNLIGALLFDSGETAEATRLKRTARRRYTRRKNRICYLQEIFSNEMAKVDD
SFFHRLEESFLVEEDKKHERHPIFGNIVDEVAYHEKYPTIYHLRKKLVDSTDKADLRL
IYLALAHMIKFRGHFLIEGDLNPDNSDVDKLFIQLVQTYNQLFEENPINASGVDAKAI
LSARLSKSRRLENLIAQLPGEKKNGLFGNLIALSLGLTPNFKSNFDLAEDAKLQLSKD
TYDDDLDNLLAQIGDQYADLFLAAKNLSDAILLSDILRVNTEITKAPLSASMIKRYDE
HHQDLTLLKALVRQQLPEKYKEIFFDQSKNGYAGYIDGGASQEEFYKFIKPILEKMD
GTEELLVKLNREDLLRKQRTFDNGSIPHQIHLGELHAILRRQEDFYPFLKDNREKIEKI
LTFRIPYYVGPLARGNSRFAWMTRKSEETITPWNFEEVVDKGASAQSFIERMTNEDK
NLPNEKVLPKHSLLYEYFTVYNELTKVKYVTEGMRKPAFLSGEQKKAIVDLLFKTNR
KVTVKQLKEDYFKKIECFDSVEISGVEDRFNASLGTYHDLLKIIKDKDFLDNEENEDI
LEDIVLTLTLFEDREMIEERLKTYAHLEDDKVMKQLKRRRYTGWGRLSRKLINGIRD
KQSGKTILDFLKSDGFANRNFMQLIHDDSLTFKEDIQKAQVSGQGDSLHEHIANLAG
SPAIKKGILQTVKVVDELVKVMGRHKPENIVIEMARENQTTQKGQKNSRERMKRIEE
GIKELGSQILKEHPVENTQLQNEKLYLYYLQNGRDMYVDQELDINRLSDYDVDHIVP
QSFLKDDSIDNKVLTRSDKNRGKSDNVPSEEVVKKMKNYWRQLLNAKLITQRKFDN
LTKAERGGLSELDKAGFIKRQLVETRQITKHVAQILDSRMNTKYDENDKLIREVKVIT
LKSKLVSDFRKDFQFYKVREINNYHHAHDAYLNAVVGTALIKKYPKLESEFVYGDY
KVYDVRKMIAKSEQEIGKATAKYFFYSNIMNFFKTEITLANGEIRKRPLIETNGETGEI
VWDKGRDFATVRKVLSMPQVNIVKKTEVQTGGFSKESILPKRNSDKLIARKKDWDP
KKYGGFDSPTVAYSVLVVAKVEKGKSKKLKSVKELLGITIMERSSFEKNPIDFLEAK
GYKEVKKDLIIKLPKYSLFELENGRKRMLASAGELQKGNELALPSKYVNFLYLASHY
EKLKGSPEDNEQKQLFVEQHKHYLDEIIEQISEFSKRVILADANLDKVLSAYNKHRDK
PIREQAENIIHLFTLTNLGAPAAFKYFDTTIDRKRYTSTKEVLDATLIHQSITGLYETRI
DLSQLGGDSGGSPKKKRKV
pNMG-620 amino acid sequence: ecTadA_{(wild-type)}-(SGGS)₂-XTEN-(SGGS)₂-
ecTadA_{(W23R}_H36L_P48A_R51L_L84F_A106V_D108N_H123Y_S146C_D147Y_R152P_E155V_I156F_K157N)-
(SGGS)₂-XTEN-(SGGS)₂_nCas9_GGS_NLS
(SEQ ID NO: 106)
MSEVEFSHEYWMRHALTLAKRAWDEREVPVGAVLVHNNRVIGEGWNRPIGRH
DPTAHAEIMALRQGGLVMQNYRLIDATLYVTLEPCVMCAGAMIHSRIGRVVFG
ARDAKTGAAGSLMDVLHHPGMNHRVEITEGILADECAALLSDFFRMRRQEIKA
QKKAQSSTDSGGSSGGSSGSETPGTSESATPESSGGSSGGSSEVEFSHEYWMRHALT
LAKRARDEREVPVGAVLVLNNRVIGEGWNRAIGLHDPTAHAEIMALRQGGLV
MQNYRLIDATLYVTFEPCVMCAGAMIHSRIGRVVFGVRNAKTGAAGSLMDVLH
YPGMNHRVEITEGILADECAALLCYFFRMPRQVFNAQKKAQSSTDSGGSSGGSS
GSETPGTSESATPESSGGSSGGSDKKYSIGLAIGTNSVGWAVITDEYKVPSKKFKVLGN
TDRHSIKKNLIGALLEDSGETAEATRLKRTARRRYTRRKNRICYLQEIFSNEMAKVDD
SFFHRLEESFLVEEDKKHERHPIFGNIVDEVAYHEKYPTIYHLRKKLVDSTDKADLRL
IYLALAHMIKFRGHFLIEGDLNPDNSDVDKLFIQLVQTYNQLFEENPINASGVDAKAI
LSARLSKSRRLENLIAQLPGEKKNGLFGNLIALSLGLTPNFKSNFDLAEDAKLQLSKD
TYDDDLDNLLAQIGDQYADLFLAAKNLSDAILLSDILRVNTEITKAPLSASMIKRYDE
HHQDLTLLKALVRQQLPEKYKEIFFDQSKNGYAGYIDGGASQEEFYKFIKPILEKMD
GTEELLVKLNREDLLRKQRTFDNGSIPHQIHLGELHAILRRQEDFYPFLKDNREKIEKI
LTFRIPYYVGPLARGNSRFAWMTRKSEETITPWNFEEVVDKGASAQSFIERMTNFDK
NLPNEKVLPKHSLLYEYFTVYNELTKVKYVTEGMRKPAFLSGEQKKAIVDLLFKTNR
KVTVKQLKEDYFKKIECFDSVEISGVEDRENASLGTYHDLLKIIKDKDELDNEENEDI
LEDIVLTLTLFEDREMIEERLKTYAHLEDDKVMKQLKRRRYTGWGRLSRKLINGIRD
KQSGKTILDFLKSDGFANRNFMQLIHDDSLTFKEDIQKAQVSGQGDSLHEHIANLAG
SPAIKKGILQTVKVVDELVKVMGRHKPENIVIEMARENQTTQKGQKNSRERMKRIEE
GIKELGSQILKEHPVENTQLQNEKLYLYYLQNGRDMYVDQELDINRLSDYDVDHIVP
QSFLKDDSIDNKVLTRSDKNRGKSDNVPSEEVVKKMKNYWRQLLNAKLITQRKFDN
LTKAERGGLSELDKAGFIKRQLVETRQITKHVAQILDSRMNTKYDENDKLIREVKVIT
LKSKLVSDFRKDFQFYKVREINNYHHAHDAYLNAVVGTALIKKYPKLESEFVYGDY
KVYDVRKMIAKSEQEIGKATAKYFFYSNIMNFFKTEITLANGEIRKRPLIETNGETGEI
VWDKGRDFATVRKVLSMPQVNIVKKTEVQTGGFSKESILPKRNSDKLIARKKDWDP
KKYGGFDSPTVAYSVLVVAKVEKGKSKKLKSVKELLGITIMERSSFEKNPIDFLEAK
GYKEVKKDLIIKLPKYSLFELENGRKRMLASAGELQKGNELALPSKYVNFLYLASHY
EKLKGSPEDNEQKQLFVEQHKHYLDEIIEQISEFSKRVILADANLDKVLSAYNKHRDK
PIREQAENIIHLFTLTNLGAPAAFKYFDTTIDRKRYTSTKEVLDATLIHQSITGLYETRI
DLSQLGGDSGGSPKKKRKV
pNMG-621 amino acid sequence: ecTadA_{(wild-type)}-32 a.a. linker-
ecTadA_{(H36L}_P48A_R51L_L84F_A106V_D108N_H123Y_S146C_D147Y_R152P_E155V_I156F_K157N)-24 a.a.
linker_nCas9_GGS_NLS
(SEQ ID NO: 107)
MSEVEFSHEYWMRHALTLAKRAWDEREVPVGAVLVHNNRVIGEGWNRPIGRH
DPTAHAEIMALRQGGLVMQNYRLIDATLYVTLEPCVMCAGAMIHSRIGRVVFG
ARDAKTGAAGSLMDVLHHPGMNHRVEITEGILADECAALLSDFFRMRRQEIKA
QKKAQSSTDSGGSSGGSSGSETPGTSESATPESSGGSSGGSSEVEFSHEYWMRHALTL
AKRAWDEREVPVGAVLVLNNRVIGEGWNRAIGLHDPTAHAEIMALRQGGLVM
QNYRLIDATLYVTFEPCVMCAGAMIHSRIGRVVFGVRNAKTGAAGSLMDVLHY
PGMNHRVEITEGILADECAALLCYFFRMPRQVFNAQKKAQSSTDSGGSSGGSSGS
ETPGTSESATPESDKKYSIGLAIGTNSVGWAVITDEYKVPSKKFKVLGNTDRHSIKKNL
IGALLFDSGETAEATRLKRTARRRYTRRKNRICYLQEIFSNEMAKVDDSFFHRLEESF
LVEEDKKHERHPIFGNIVDEVAYHEKYPTIYHLRKKLVDSTDKADLRLIYLALAHMI
KFRGHFLIEGDLNPDNSDVDKLFIQLVQTYNQLFEENPINASGVDAKAILSARLSKSR
RLENLIAQLPGEKKNGLFGNLIALSLGLTPNFKSNEDLAEDAKLQLSKDTYDDDLDN
LLAQIGDQYADLFLAAKNLSDAILLSDILRVNTEITKAPLSASMIKRYDEHHQDLTLL
KALVRQQLPEKYKEIFFDQSKNGYAGYIDGGASQEEFYKFIKPILEKMDGTEELLVKL
NREDLLRKQRTFDNGSIPHQIHLGELHAILRRQEDFYPFLKDNREKIEKILTFRIPYYV
GPLARGNSRFAWMTRKSEETITPWNFEEVVDKGASAQSFIERMTNFDKNLPNEKVLP
KHSLLYEYFTVYNELTKVKYVTEGMRKPAFLSGEQKKAIVDLLFKTNRKVTVKQLK
EDYFKKIECFDSVEISGVEDRFNASLGTYHDLLKIIKDKDFLDNEENEDILEDIVLTLTL
FEDREMIEERLKTYAHLEDDKVMKQLKRRRYTGWGRLSRKLINGIRDKQSGKTILDF
LKSDGFANRNFMQLIHDDSLTFKEDIQKAQVSGQGDSLHEHIANLAGSPAIKKGILQT
VKVVDELVKVMGRHKPENIVIEMARENQTTQKGQKNSRERMKRIEEGIKELGSQILK
EHPVENTQLQNEKLYLYYLQNGRDMYVDQELDINRLSDYDVDHIVPQSFLKDDSID
NKVLTRSDKNRGKSDNVPSEEVVKKMKNYWRQLLNAKLITQRKFDNLTKAERGGL
SELDKAGFIKRQLVETRQITKHVAQILDSRMNTKYDENDKLIREVKVITLKSKLVSDF
RKDFQFYKVREINNYHHAHDAYLNAVVGTALIKKYPKLESEFVYGDYKVYDVRKM
IAKSEQEIGKATAKYFFYSNIMNFFKTEITLANGEIRKRPLIETNGETGEIVWDKGRDF
ATVRKVLSMPQVNIVKKTEVQTGGFSKESILPKRNSDKLIARKKDWDPKKYGGFDSP
TVAYSVLVVAKVEKGKSKKLKSVKELLGITIMERSSFEKNPIDFLEAKGYKEVKKDLI
IKLPKYSLFELENGRKRMLASAGELQKGNELALPSKYVNFLYLASHYEKLKGSPEDN
EQKQLFVEQHKHYLDEIIEQISEFSKRVILADANLDKVLSAYNKHRDKPIREQAENIIH
LFTLTNLGAPAAFKYFDTTIDRKRYTSTKEVLDATLIHQSITGLYETRIDLSQLGGDSG
GSPKKKRKV
pNMG-622 amino acid sequence: ecTadA_{(wild-type)}-32 a.a. linker-
ecTadA_{(H36L}_P48A_R51L_L84F_A106V_D108N_H123Y_A142N_S146C_D147Y_R152P_E155V_I156F_K157N)-24 a.a.
linker_nCas9_GGS_NLS
(SEQ ID NO: 108)
MSEVEFSHEYWMRHALTLAKRAWDEREVPVGAVLVHNNRVIGEGWNRPIGRH
DPTAHAEIMALRQGGLVMQNYRLIDATLYVTLEPCVMCAGAMIHSRIGRVVFG
ARDAKTGAAGSLMDVLHHPGMNHRVEITEGILADECAALLSDFFRMRRQEIKA
QKKAQSSTDSGGSSGGSSGSETPGTSESATPESSGGSSGGSSEVEFSHEYWMRHALTL
AKRAWDEREVPVGAVLVLNNRVIGEGWNRAIGLHDPTAHAEIMALRQGGLVM
QNYRLIDATLYVTFEPCVMCAGAMIHSRIGRVVFGVRNAKTGAAGSLMDVLHY
PGMNHRVEITEGILADECNALLCYFFRMPRQVFNAQKKAQSSTDSGGSSGGSSGS
ETPGTSESATPESDKKYSIGLAIGTNSVGWAVITDEYKVPSKKFKVLGNTDRHSIKKNL
IGALLFDSGETAEATRLKRTARRRYTRRKNRICYLQEIFSNEMAKVDDSFFHRLEESF
LVEEDKKHERHPIFGNIVDEVAYHEKYPTIYHLRKKLVDSTDKADLRLIYLALAHMI
KFRGHFLIEGDLNPDNSDVDKLFIQLVQTYNQLFEENPINASGVDAKAILSARLSKSR
RLENLIAQLPGEKKNGLFGNLIALSLGLTPNFKSNFDLAEDAKLQLSKDTYDDDLDN
LLAQIGDQYADLFLAAKNLSDAILLSDILRVNTEITKAPLSASMIKRYDEHHQDLTLL
KALVRQQLPEKYKEIFFDQSKNGYAGYIDGGASQEEFYKFIKPILEKMDGTEELLVKL
NREDLLRKQRTFDNGSIPHQIHLGELHAILRRQEDFYPFLKDNREKIEKILTFRIPYYV
GPLARGNSRFAWMTRKSEETITPWNFEEVVDKGASAQSFIERMTNFDKNLPNEKVLP
KHSLLYEYFTVYNELTKVKYVTEGMRKPAFLSGEQKKAIVDLLFKTNRKVTVKQLK
EDYFKKIECFDSVEISGVEDRFNASLGTYHDLLKIIKDKDFLDNEENEDILEDIVLTLTL
FEDREMIEERLKTYAHLEDDKVMKQLKRRRYTGWGRLSRKLINGIRDKQSGKTILDF
LKSDGFANRNFMQLIHDDSLTFKEDIQKAQVSGQGDSLHEHIANLAGSPAIKKGILQT
VKVVDELVKVMGRHKPENIVIEMARENQTTQKGQKNSRERMKRIEEGIKELGSQILK
EHPVENTQLQNEKLYLYYLQNGRDMYVDQELDINRLSDYDVDHIVPQSFLKDDSID
NKVLTRSDKNRGKSDNVPSEEVVKKMKNYWRQLLNAKLITQRKEDNLTKAERGGL
SELDKAGFIKRQLVETRQITKHVAQILDSRMNTKYDENDKLIREVKVITLKSKLVSDF
RKDFQFYKVREINNYHHAHDAYLNAVVGTALIKKYPKLESEFVYGDYKVYDVRKM
IAKSEQEIGKATAKYFFYSNIMNFFKTEITLANGEIRKRPLIETNGETGEIVWDKGRDF
ATVRKVLSMPQVNIVKKTEVQTGGFSKESILPKRNSDKLIARKKDWDPKKYGGFDSP
TVAYSVLVVAKVEKGKSKKLKSVKELLGITIMERSSFEKNPIDFLEAKGYKEVKKDLI
IKLPKYSLFELENGRKRMLASAGELQKGNELALPSKYVNFLYLASHYEKLKGSPEDN
EQKQLFVEQHKHYLDEIIEQISEFSKRVILADANLDKVLSAYNKHRDKPIREQAENIIH
LFTLTNLGAPAAFKYFDTTIDRKRYTSTKEVLDATLIHQSITGLYETRIDLSQLGGDSG
GSPKKKRKV
pNMG-623 amino acid sequence: ecTadA_{(wild-type)}-32 a.a. linker-
ecTadA_{(W23L}_H36L_P48A_R51L_L84F_A106V_D108N_H123Y_S146C_D147Y_R152P_E155V_I156F_K157N)-24 a.a.
linker_nCas9_GGS_NLS
(SEQ ID NO: 109)
MSEVEFSHEYWMRHALTLAKRAWDEREVPVGAVLVHNNRVIGEGWNRPIGRH
DPTAHAEIMALRQGGLVMQNYRLIDATLYVTLEPCVMCAGAMIHSRIGRVVFG
ARDAKTGAAGSLMDVLHHPGMNHRVEITEGILADECAALLSDFFRMRRQEIKA
QKKAQSSTDSGGSSGGSSGSETPGTSESATPESSGGSSGGSSEVEFSHEYWMRHALTL
AKRALDEREVPVGAVLVLNNRVIGEGWNRAIGLHDPTAHAEIMALRQGGLVM
QNYRLIDATLYVTFEPCVMCAGAMIHSRIGRVVFGVRNAKTGAAGSLMDVLHY
PGMNHRVEITEGILADECAALLCYFFRMPRQVFNAQKKAQSSTDSGGSSGGSSGS
ETPGTSESATPESDKKYSIGLAIGTNSVGWAVITDEYKVPSKKFKVLGNTDRHSIKKNL
IGALLFDSGETAEATRLKRTARRRYTRRKNRICYLQEIFSNEMAKVDDSFFHRLEESF
LVEEDKKHERHPIFGNIVDEVAYHEKYPTIYHLRKKLVDSTDKADLRLIYLALAHMI
KFRGHFLIEGDLNPDNSDVDKLFIQLVQTYNQLFEENPINASGVDAKAILSARLSKSR
RLENLIAQLPGEKKNGLFGNLIALSLGLTPNFKSNFDLAEDAKLQLSKDTYDDDLDN
LLAQIGDQYADLFLAAKNLSDAILLSDILRVNTEITKAPLSASMIKRYDEHHQDLTLL
KALVRQQLPEKYKEIFFDQSKNGYAGYIDGGASQEEFYKFIKPILEKMDGTEELLVKL
NREDLLRKQRTFDNGSIPHQIHLGELHAILRRQEDFYPFLKDNREKIEKILTFRIPYYV
GPLARGNSRFAWMTRKSEETITPWNFEEVVDKGASAQSFIERMTNFDKNLPNEKVLP
KHSLLYEYFTVYNELTKVKYVTEGMRKPAFLSGEQKKAIVDLLFKTNRKVTVKQLK
EDYFKKIECFDSVEISGVEDRFNASLGTYHDLLKIIKDKDFLDNEENEDILEDIVLTLTL
FEDREMIEERLKTYAHLEDDKVMKQLKRRRYTGWGRLSRKLINGIRDKQSGKTILDF
LKSDGFANRNFMQLIHDDSLTFKEDIQKAQVSGQGDSLHEHIANLAGSPAIKKGILQT
VKVVDELVKVMGRHKPENIVIEMARENQTTQKGQKNSRERMKRIEEGIKELGSQILK
EHPVENTQLQNEKLYLYYLQNGRDMYVDQELDINRLSDYDVDHIVPQSFLKDDSID
NKVLTRSDKNRGKSDNVPSEEVVKKMKNYWRQLLNAKLITQRKEDNLTKAERGGL
SELDKAGFIKRQLVETRQITKHVAQILDSRMNTKYDENDKLIREVKVITLKSKLVSDF
RKDFQFYKVREINNYHHAHDAYLNAVVGTALIKKYPKLESEFVYGDYKVYDVRKM
JAKSEQEIGKATAKYFFYSNIMNFFKTEITLANGEIRKRPLIETNGETGEIVWDKGRDF
ATVRKVLSMPQVNIVKKTEVQTGGFSKESILPKRNSDKLIARKKDWDPKKYGGFDSP
TVAYSVLVVAKVEKGKSKKLKSVKELLGITIMERSSFEKNPIDFLEAKGYKEVKKDLI
IKLPKYSLFELENGRKRMLASAGELQKGNELALPSKYVNFLYLASHYEKLKGSPEDN
EQKQLFVEQHKHYLDEIIEQISEFSKRVILADANLDKVLSAYNKHRDKPIREQAENIIH
LFTLTNLGAPAAFKYFDTTIDRKRYTSTKEVLDATLIHQSITGLYETRIDLSQLGGDSG
GSPKKKRKV
ABE6.3: ecTadA_{(wild-type)}-(SGGS)₂-XTEN-(SGGS)₂-
ecTadA_{(H36L}_P48S_R51L_L84F_A106V_D108N_H123Y_S146C_D147Y_E155V_I156F_K157N)-(SGGS)₂-XTEN-
(SGGS)₂_nCas9_SGGS_NLS
(SEQ ID NO: 110)
MSEVEFSHEYWMRHALTLAKRAWDEREVPVGAVLVHNNRVIGEGWNRPIGR
HDPTAHAEIMALRQGGLVMQNYRLIDATLYVTLEPCVMCAGAMIHSRIGRVV
FGARDAKTGAAGSLMDVLHHPGMNHRVEITEGILADECAALLSDFFRMRRQE
IKAQKKAQSSTDSGGSSGGSSGSETPGTSESATPESSGGSSGGSSEVEFSHEYWMR
HALTLAKRAWDEREVPVGAVLVLNNRVIGEGWNRSIGLHDPTAHAEIMALRQ
GGLVMQNYRLIDATLYVTFEPCVMCAGAMIHSRIGRVVFGVRNAKTGAAGSL
MDVLHYPGMNHRVEITEGILADECAALLCYFFRMRRQVFNAQKKAQSSTDSG
GSSGGSSGSETPGTSESATPESSGGSSGGSDKKYSIGLAIGTNSVGWAVITDEYKVPS
KKFKVLGNTDRHSIKKNLIGALLEDSGETAEATRLKRTARRRYTRRKNRICYLQEIF
SNEMAKVDDSFFHRLEESFLVEEDKKHERHPIFGNIVDEVAYHEKYPTIYHLRKKLV
DSTDKADLRLIYLALAHMIKFRGHFLIEGDLNPDNSDVDKLFIQLVQTYNQLFEENP
INASGVDAKAILSARLSKSRRLENLIAQLPGEKKNGLFGNLIALSLGLTPNFKSNFDL
AEDAKLQLSKDTYDDDLDNLLAQIGDQYADLFLAAKNLSDAILLSDILRVNTEITK
APLSASMIKRYDEHHQDLTLLKALVRQQLPEKYKEIFFDQSKNGYAGYIDGGASQE
EFYKFIKPILEKMDGTEELLVKLNREDLLRKQRTFDNGSIPHQIHLGELHAILRRQED
FYPFLKDNREKIEKILTFRIPYYVGPLARGNSRFAWMTRKSEETITPWNFEEVVDKG
ASAQSFIERMTNFDKNLPNEKVLPKHSLLYEYFTVYNELTKVKYVTEGMRKPAFLS
GEQKKAIVDLLFKTNRKVTVKQLKEDYFKKIECFDSVEISGVEDRFNASLGTYHDL
LKIIKDKDFLDNEENEDILEDIVLTLTLFEDREMIEERLKTYAHLEDDKVMKQLKRR
RYTGWGRLSRKLINGIRDKQSGKTILDFLKSDGFANRNFMQLIHDDSLTFKEDIQKA
QVSGQGDSLHEHIANLAGSPAIKKGILQTVKVVDELVKVMGRHKPENIVIEMAREN
QTTQKGQKNSRERMKRIEEGIKELGSQILKEHPVENTQLQNEKLYLYYLQNGRDM
YVDQELDINRLSDYDVDHIVPQSFLKDDSIDNKVLTRSDKNRGKSDNVPSEEVVKK
MKNYWRQLLNAKLITQRKFDNLTKAERGGLSELDKAGFIKRQLVETRQITKHVAQI
LDSRMNTKYDENDKLIREVKVITLKSKLVSDFRKDFQFYKVREINNYHHAHDAYL
NAVVGTALIKKYPKLESEFVYGDYKVYDVRKMIAKSEQEIGKATAKYFFYSNIMNF
FKTEITLANGEIRKRPLIETNGETGEIVWDKGRDFATVRKVLSMPQVNIVKKTEVQT
GGFSKESILPKRNSDKLIARKKDWDPKKYGGFDSPTVAYSVLVVAKVEKGKSKKL
KSVKELLGITIMERSSFEKNPIDFLEAKGYKEVKKDLIIKLPKYSLFELENGRKRMLA
SAGELQKGNELALPSKYVNFLYLASHYEKLKGSPEDNEQKQLFVEQHKHYLDEIIE
QISEFSKRVILADANLDKVLSAYNKHRDKPIREQAENIIHLFTLTNLGAPAAFKYED
TTIDRKRYTSTKEVLDATLIHQSITGLYETRIDLSQLGGDSGGSPKKKRKV
ABE6.4: ecTadA_{(wild-type)}-(SGGS)₂-XTEN-(SGGS)₂-
ecTadA_{(H36L}_P48S_R51L_L84F_A106V_D108N_H123Y_A142N_S146C_D147Y_E155V_I156F_K157N)-(SGGS)₂-
XTEN-(SGGS)₂_nCas9_SGGS_NLS
(SEQ ID NO: 111)
MSEVEFSHEYWMRHALTLAKRAWDEREVPVGAVLVHNNRVIGEGWNRPIGR
HDPTAHAEIMALRQGGLVMQNYRLIDATLYVTLEPCVMCAGAMIHSRIGRVV
FGARDAKTGAAGSLMDVLHHPGMNHRVEITEGILADECAALLSDFFRMRRQE
IKAQKKAQSSTDSGGSSGGSSGSETPGTSESATPESSGGSSGGSSEVEFSHEYWMR
HALTLAKRAWDEREVPVGAVLVLNNRVIGEGWNRSIGLHDPTAHAEIMALRQ
GGLVMQNYRLIDATLYVTFEPCVMCAGAMIHSRIGRVVFGVRNAKTGAAGSL
MDVLHYPGMNHRVEITEGILADECNALLCYFFRMRRQVFNAQKKAQSSTDSG
GSSGGSSGSETPGTSESATPESSGGSSGGSDKKYSIGLAIGTNSVGWAVITDEYKVPS
KKFKVLGNTDRHSIKKNLIGALLFDSGETAEATRLKRTARRRYTRRKNRICYLQEIF
SNEMAKVDDSFFHRLEESFLVEEDKKHERHPIFGNIVDEVAYHEKYPTIYHLRKKLV
DSTDKADLRLIYLALAHMIKFRGHFLIEGDLNPDNSDVDKLFIQLVQTYNQLFEENP
INASGVDAKAILSARLSKSRRLENLIAQLPGEKKNGLFGNLIALSLGLTPNFKSNFDL
AEDAKLQLSKDTYDDDLDNLLAQIGDQYADLFLAAKNLSDAILLSDILRVNTEITK
APLSASMIKRYDEHHQDLTLLKALVRQQLPEKYKEIFFDQSKNGYAGYIDGGASQE
EFYKFIKPILEKMDGTEELLVKLNREDLLRKQRTFDNGSIPHQIHLGELHAILRRQED
FYPFLKDNREKIEKILTFRIPYYVGPLARGNSRFAWMTRKSEETITPWNFEEVVDKG
ASAQSFIERMTNFDKNLPNEKVLPKHSLLYEYFTVYNELTKVKYVTEGMRKPAFLS
GEQKKAIVDLLFKTNRKVTVKQLKEDYFKKIECFDSVEISGVEDRFNASLGTYHDL
LKIIKDKDFLDNEENEDILEDIVLTLTLFEDREMIEERLKTYAHLFDDKVMKQLKRR
RYTGWGRLSRKLINGIRDKQSGKTILDFLKSDGFANRNFMQLIHDDSLTFKEDIQKA
QVSGQGDSLHEHIANLAGSPAIKKGILQTVKVVDELVKVMGRHKPENIVIEMAREN
QTTQKGQKNSRERMKRIEEGIKELGSQILKEHPVENTQLQNEKLYLYYLQNGRDM
YVDQELDINRLSDYDVDHIVPQSFLKDDSIDNKVLTRSDKNRGKSDNVPSEEVVKK
MKNYWRQLLNAKLITQRKFDNLTKAERGGLSELDKAGFIKRQLVETRQITKHVAQI
LDSRMNTKYDENDKLIREVKVITLKSKLVSDFRKDFQFYKVREINNYHHAHDAYL
NAVVGTALIKKYPKLESEFVYGDYKVYDVRKMIAKSEQEIGKATAKYFFYSNIMNF
FKTEITLANGEIRKRPLIETNGETGEIVWDKGRDFATVRKVLSMPQVNIVKKTEVQT
GGFSKESILPKRNSDKLIARKKDWDPKKYGGFDSPTVAYSVLVVAKVEKGKSKKL
KSVKELLGITIMERSSFEKNPIDFLEAKGYKEVKKDLIIKLPKYSLFELENGRKRMLA
SAGELQKGNELALPSKYVNFLYLASHYEKLKGSPEDNEQKQLFVEQHKHYLDEIIE
QISEFSKRVILADANLDKVLSAYNKHRDKPIREQAENIIHLFTLTNLGAPAAFKYFD
TTIDRKRYTSTKEVLDATLIHQSITGLYETRIDLSQLGGDSGGSPKKKRKV
ABE7.8: ecTadA_{(wild-type)}-(SGGS)₂-XTEN-(SGGS)₂-
ecTadA_{(W23L}_H36L_P48A_R51L_L84F_A106V_D108N_H123Y_A142N_S146C_D147Y_E155V_I156F_K157N)-
(SGGS)₂-XTEN-(SGGS)₂_nCas9_SGGS_NLS
(SEQ ID NO: 112)
MSEVEFSHEYWMRHALTLAKRAWDEREVPVGAVLVHNNRVIGEGWNRPIGR
HDPTAHAEIMALRQGGLVMQNYRLIDATLYVTLEPCVMCAGAMIHSRIGRVV
FGARDAKTGAAGSLMDVLHHPGMNHRVEITEGILADECAALLSDFFRMRRQE
IKAQKKAQSSTDSGGSSGGSSGSETPGTSESATPESSGGSSGGSSEVEFSHEYWMR
HALTLAKRALDEREVPVGAVLVLNNRVIGEGWNRAIGLHDPTAHAEIMALRQ
GGLVMQNYRLIDATLYVTFEPCVMCAGAMIHSRIGRVVFGVRNAKTGAAGSL
MDVLHYPGMNHRVEITEGILADECNALLCYFFRMRRQVFNAQKKAQSSTDSG
GSSGGSSGSETPGTSESATPESSGGSSGGSDKKYSIGLAIGTNSVGWAVITDEYKVPS
KKFKVLGNTDRHSIKKNLIGALLFDSGETAEATRLKRTARRRYTRRKNRICYLQEIF
SNEMAKVDDSFFHRLEESFLVEEDKKHERHPIFGNIVDEVAYHEKYPTIYHLRKKLV
DSTDKADLRLIYLALAHMIKFRGHFLIEGDLNPDNSDVDKLFIQLVQTYNQLFEENP
INASGVDAKAILSARLSKSRRLENLIAQLPGEKKNGLFGNLIALSLGLTPNFKSNFDL
AEDAKLQLSKDTYDDDLDNLLAQIGDQYADLFLAAKNLSDAILLSDILRVNTEITK
APLSASMIKRYDEHHQDLTLLKALVRQQLPEKYKEIFFDQSKNGYAGYIDGGASQE
EFYKFIKPILEKMDGTEELLVKLNREDLLRKQRTFDNGSIPHQIHLGELHAILRRQED
FYPFLKDNREKIEKILTFRIPYYVGPLARGNSRFAWMTRKSEETITPWNFEEVVDKG
ASAQSFIERMTNFDKNLPNEKVLPKHSLLYEYFTVYNELTKVKYVTEGMRKPAFLS
GEQKKAIVDLLFKTNRKVTVKQLKEDYFKKIECFDSVEISGVEDRFNASLGTYHDL
LKIIKDKDFLDNEENEDILEDIVLTLTLFEDREMIEERLKTYAHLFDDKVMKQLKRR
RYTGWGRLSRKLINGIRDKQSGKTILDFLKSDGFANRNFMQLIHDDSLTFKEDIQKA
QVSGQGDSLHEHIANLAGSPAIKKGILQTVKVVDELVKVMGRHKPENIVIEMAREN
QTTQKGQKNSRERMKRIEEGIKELGSQILKEHPVENTQLQNEKLYLYYLQNGRDM
YVDQELDINRLSDYDVDHIVPQSFLKDDSIDNKVLTRSDKNRGKSDNVPSEEVVKK
MKNYWRQLLNAKLITQRKFDNLTKAERGGLSELDKAGFIKRQLVETRQITKHVAQI
LDSRMNTKYDENDKLIREVKVITLKSKLVSDFRKDFQFYKVREINNYHHAHDAYL
NAVVGTALIKKYPKLESEFVYGDYKVYDVRKMIAKSEQEIGKATAKYFFYSNIMNE
FKTEITLANGEIRKRPLIETNGETGEIVWDKGRDFATVRKVLSMPQVNIVKKTEVQT
GGFSKESILPKRNSDKLIARKKDWDPKKYGGFDSPTVAYSVLVVAKVEKGKSKKL
KSVKELLGITIMERSSFEKNPIDFLEAKGYKEVKKDLIIKLPKYSLFELENGRKRMLA
SAGELQKGNELALPSKYVNFLYLASHYEKLKGSPEDNEQKQLFVEQHKHYLDEDIE
QISEFSKRVILADANLDKVLSAYNKHRDKPIREQAENIIHLFTLTNLGAPAAFKYFDT
TIDRKRYTSTKEVLDATLIHQSITGLYETRIDLSQLGGDSGGSPKKKRKV
ABE7.9: ecTadA_{(wild-type)}-(SGGS)₂-XTEN-(SGGS)₂-
ecTadA_{(W23L}_H36L_P48A_R51L_L84F_A106V_D108N_H123Y_A142N_S146C_D147Y_R152P_E155V_I156F_K157N)-
(SGGS)₂-XTEN-(SGGS)₂_nCas9_SGGS_NLS
(SEQ ID NO: 113)
MSEVEFSHEYWMRHALTLAKRAWDEREVPVGAVLVHNNRVIGEGWNRPIGR
HDPTAHAEIMALRQGGLVMQNYRLIDATLYVTLEPCVMCAGAMIHSRIGRVV
FGARDAKTGAAGSLMDVLHHPGMNHRVEITEGILADECAALLSDFFRMRRQE
IKAQKKAQSSTDSGGSSGGSSGSETPGTSESATPESSGGSSGGSSEVEFSHEYWMR
HALTLAKRALDEREVPVGAVLVLNNRGEGWNRAIGLHDPTAHAEIMALRQGG
LVMQNYRLIDATLYVTFEPCVMCAGAMIHSRIGRVVFGVRNAKTGAAGSLMD
VLHYPGMNHRVEITEGILADECNALLCYFFRMPRQVFNAQKKAQSSTDSGGSS
GGSSGSETPGTSESATPESSGGSSGGSDKKYSIGLAIGTNSVGWAVITDEYKVPSKKE
KVLGNTDRHSIKKNLIGALLFDSGETAEATRLKRTARRRYTRRKNRICYLQEIFSNE
MAKVDDSFFHRLEESFLVEEDKKHERHPIFGNIVDEVAYHEKYPTIYHLRKKLVDST
DKADLRLIYLALAHMIKFRGHFLIEGDLNPDNSDVDKLFIQLVQTYNQLFEENPINA
SGVDAKAILSARLSKSRRLENLIAQLPGEKKNGLFGNLIALSLGLTPNFKSNFDLAED
AKLQLSKDTYDDDLDNLLAQIGDQYADLFLAAKNLSDAILLSDILRVNTEITKAPLS
ASMIKRYDEHHQDLTLLKALVRQQLPEKYKEIFFDQSKNGYAGYIDGGASQEEFYK
FIKPILEKMDGTEELLVKLNREDLLRKQRTFDNGSIPHQIHLGELHAILRRQEDFYPF
LKDNREKIEKILTFRIPYYVGPLARGNSRFAWMTRKSEETITPWNFEEVVDKGASAQ
SFIERMTNFDKNLPNEKVLPKHSLLYEYFTVYNELTKVKYVTEGMRKPAFLSGEQK
KAIVDLLFKTNRKVTVKQLKEDYFKKIECFDSVEISGVEDRFNASLGTYHDLLKIIK
DKDFLDNEENEDILEDIVLTLTLFEDREMIEERLKTYAHLEDDKVMKQLKRRRYTG
WGRLSRKLINGIRDKQSGKTILDFLKSDGFANRNFMQLIHDDSLTFKEDIQKAQVSG
QGDSLHEHIANLAGSPAIKKGILQTVKVVDELVKVMGRHKPENIVIEMARENQTTQ
KGQKNSRERMKRIEEGIKELGSQILKEHPVENTQLQNEKLYLYYLQNGRDMYVDQ
ELDINRLSDYDVDHIVPQSFLKDDSIDNKVLTRSDKNRGKSDNVPSEEVVKKMKNY
WRQLLNAKLITQRKFDNLTKAERGGLSELDKAGFIKRQLVETRQITKHVAQILDSR
MNTKYDENDKLIREVKVITLKSKLVSDFRKDFQFYKVREINNYHHAHDAYLNAVV
GTALIKKYPKLESEFVYGDYKVYDVRKMIAKSEQEIGKATAKYFFYSNIMNFFKTEI
TLANGEIRKRPLIETNGETGEIVWDKGRDFATVRKVLSMPQVNIVKKTEVQTGGFS
KESILPKRNSDKLIARKKDWDPKKYGGEDSPTVAYSVLVVAKVEKGKSKKLKSVK
ELLGITIMERSSFEKNPIDFLEAKGYKEVKKDLIIKLPKYSLFELENGRKRMLASAGE
LQKGNELALPSKYVNFLYLASHYEKLKGSPEDNEQKQLFVEQHKHYLDEIIEQISEF
SKRVILADANLDKVLSAYNKHRDKPIREQAENIIHLFTLTNLGAPAAFKYFDTTIDR
KRYTSTKEVLDATLIHQSITGLYETRIDLSQLGGDSGGSPKKKRKV
ABE7.10: ecTadA_{(wild-type)}-(SGGS)₂-XTEN-(SGGS)₂-
ecTadA_{(W23R}_H36L_P48A_R51L_L84F_A106V_D108N_H123Y_S146C_D147Y_R152P_E155V_I156F_K157N)-
(SGGS)₂-XTEN-(SGGS)₂_nCas9_SGGS_NLS
(SEQ ID NO: 114)
MSEVEFSHEYWMRHALTLAKRAWDEREVPVGAVLVHNNRVIGEGWNRPIGR
HDPTAHAEIMALRQGGLVMQNYRLIDATLYVTLEPCVMCAGAMIHSRIGRVV
FGARDAKTGAAGSLMDVLHHPGMNHRVEITEGILADECAALLSDFFRMRRQE
IKAQKKAQSSTDSGGSSGGSSGSETPGTSESATPESSGGSSGGSSEVEFSHEYWMR
HALTLAKRARDEREVPVGAVLVLNNRVIGEGWNRAIGLHDPTAHAEIMALRQ
GGLVMQNYRLIDATLYVTFEPCVMCAGAMIHSRIGRVVFGVRNAKTGAAGSL
MDVLHYPGMNHRVEITEGILADECAALLCYFFRMPRQVFNAQKKAQSSTDSG
GSSGGSSGSETPGTSESATPESSGGSSGGSDKKYSIGLAIGTNSVGWAVITDEYKVPS
KKFKVLGNTDRHSIKKNLIGALLFDSGETAEATRLKRTARRRYTRRKNRICYLQEIF
SNEMAKVDDSFFHRLEESFLVEEDKKHERHPIFGNIVDEVAYHEKYPTIYHLRKKLV
DSTDKADLRLIYLALAHMIKFRGHFLIEGDLNPDNSDVDKLFIQLVQTYNQLFEENP
INASGVDAKAILSARLSKSRRLENLIAQLPGEKKNGLFGNLIALSLGLTPNFKSNEDL
AEDAKLQLSKDTYDDDLDNLLAQIGDQYADLFLAAKNLSDAILLSDILRVNTEITK
APLSASMIKRYDEHHQDLTLLKALVRQQLPEKYKEIFFDQSKNGYAGYIDGGASQE
EFYKFIKPILEKMDGTEELLVKLNREDLLRKQRTFDNGSIPHQIHLGELHAILRRQED
FYPFLKDNREKIEKILTFRIPYYVGPLARGNSRFAWMTRKSEETITPWNFEEVVDKG
ASAQSFIERMTNFDKNLPNEKVLPKHSLLYEYFTVYNELTKVKYVTEGMRKPAFLS
GEQKKAIVDLLFKTNRKVTVKQLKEDYFKKIECFDSVEISGVEDRFNASLGTYHDL
LKIIKDKDFLDNEENEDILEDIVLTLTLFEDREMIEERLKTYAHLFDDKVMKQLKRR
RYTGWGRLSRKLINGIRDKQSGKTILDFLKSDGFANRNFMQLIHDDSLTFKEDIQKA
QVSGQGDSLHEHIANLAGSPAIKKGILQTVKVVDELVKVMGRHKPENIVIEMAREN
QTTQKGQKNSRERMKRIEEGIKELGSQILKEHPVENTQLQNEKLYLYYLQNGRDM
YVDQELDINRLSDYDVDHIVPQSFLKDDSIDNKVLTRSDKNRGKSDNVPSEEVVKK
MKNYWRQLLNAKLITQRKFDNLTKAERGGLSELDKAGFIKRQLVETRQITKHVAQI
LDSRMNTKYDENDKLIREVKVITLKSKLVSDFRKDFQFYKVREINNYHHAHDAYL
NAVVGTALIKKYPKLESEFVYGDYKVYDVRKMIAKSEQEIGKATAKYFFYSNIMNF
FKTEITLANGEIRKRPLIETNGETGEIVWDKGRDFATVRKVLSMPQVNIVKKTEVQT
GGFSKESILPKRNSDKLIARKKDWDPKKYGGFDSPTVAYSVLVVAKVEKGKSKKL
KSVKELLGITIMERSSFEKNPIDFLEAKGYKEVKKDLIIKLPKYSLFELENGRKRMLA
SAGELQKGNELALPSKYVNFLYLASHYEKLKGSPEDNEQKQLFVEQHKHYLDEIIE
QISEFSKRVILADANLDKVLSAYNKHRDKPIREQAENIIHLFTLTNLGAPAAFKYFDT
TIDRKRYTSTKEVLDATLIHQSITGLYETRIDLSQLGGDSGGSPKKKRKV
ABEmax (7.10): NLS_ecTadA_{(wild-type)}-(SGGS)₂-XTEN-(SGGS)₂-
ecTadA7.10_{(W23R}_H36L_P48A_R51L_L84F_A106V_D108N_H123Y_S146C_D147Y_R152P_E155V_I156F_K157N)-
(SGGS)₂-XTEN-(SGGS)₂_nCas9 VRQR_SGGS_NLS
(SEQ ID NO: 115)
MKRTADGSEFESPKKKRKVSEVEFSHEYWMRHALTLAKRAWDEREVPVGAVLVH
NNRVIGEGWNRPIGRHDPTAHAEIMALRQGGLVMQNYRLIDATLYVTLEPCVM
CAGAMIHSRIGRVVFGARDAKTGAAGSLMDVLHHPGMNHRVEITEGILADECA
ALLSDFFRMRRQEIKAQKKAQSSTDSGGSSGGSSGSETPGTSESATPESSGGSSGGSS
EVEFSHEYWMRHALTLAKRARDEREVPVGAVLVLNNRVIGEGWNRAIGLHDP
TAHAEIMALRQGGLVMQNYRLIDATLYVTFEPCVMCAGAMIHSRIGRVVFGVR
NAKTGAAGSLMDVLHYPGMNHRVEITEGILADECAALLCYFFRMPRQVENAQK
KAQSSTDSGGSSGGSSGSETPGTSESATPESSGGSSGGSDKKYSIGLAIGTNSVGWAV
ITDEYKVPSKKFKVLGNTDRHSIKKNLIGALLFDSGETAEATRLKRTARRRYTRRKN
RICYLQEIFSNEMAKVDDSFFHRLEESFLVEEDKKHERHPIFGNIVDEVAYHEKYPTIY
HLRKKLVDSTDKADLRLIYLALAHMIKFRGHFLIEGDLNPDNSDVDKLFIQLVQTYN
QLFEENPINASGVDAKAILSARLSKSRRLENLIAQLPGEKKNGLFGNLIALSLGLTPNE
KSNEDLAEDAKLQLSKDTYDDDLDNLLAQIGDQYADLFLAAKNLSDAILLSDILRVN
TEITKAPLSASMIKRYDEHHQDLTLLKALVRQQLPEKYKEIFFDQSKNGYAGYIDGG
ASQEEFYKFIKPILEKMDGTEELLVKLNREDLLRKQRTFDNGSIPHQIHLGELHAILRR
QEDFYPFLKDNREKIEKILTFRIPYYVGPLARGNSRFAWMTRKSEETITPWNFEEVVD
KGASAQSFIERMTNFDKNLPNEKVLPKHSLLYEYFTVYNELTKVKYVTEGMRKPAF
LSGEQKKAIVDLLFKTNRKVTVKQLKEDYFKKIECFDSVEISGVEDRFNASLGTYHD
LLKIIKDKDFLDNEENEDILEDIVLTLTLFEDREMIEERLKTYAHLFDDKVMKQLKRR
RYTGWGRLSRKLINGIRDKQSGKTILDFLKSDGFANRNFMQLIHDDSLTFKEDIQKAQ
VSGQGDSLHEHIANLAGSPAIKKGILQTVKVVDELVKVMGRHKPENIVIEMARENQT
TQKGQKNSRERMKRIEEGIKELGSQILKEHPVENTQLQNEKLYLYYLQNGRDMYVD
QELDINRLSDYDVDHIVPQSFLKDDSIDNKVLTRSDKNRGKSDNVPSEEVVKKMKN
YWRQLLNAKLITQRKFDNLTKAERGGLSELDKAGFIKRQLVETRQITKHVAQILDSR
MNTKYDENDKLIREVKVITLKSKLVSDFRKDFQFYKVREINNYHHAHDAYLNAVVG
TALIKKYPKLESEFVYGDYKVYDVRKMIAKSEQEIGKATAKYFFYSNIMNFFKTEITL
ANGEIRKRPLIETNGETGEIVWDKGRDFATVRKVLSMPQVNIVKKTEVQTGGESKESI
LPKRNSDKLIARKKDWDPKKYGGFVSPTVAYSVLVVAKVEKGKSKKLKSVKELLGI
TIMERSSFEKNPIDFLEAKGYKEVKKDLIIKLPKYSLFELENGRKRMLASARELQKGN
ELALPSKYVNFLYLASHYEKLKGSPEDNEQKQLFVEQHKHYLDEIIEQISEFSKRVILA
DANLDKVLSAYNKHRDKPIREQAENIIHLFTLTNLGAPAAFKYFDTTIDRKQYRSTKE
VLDATLIHQSITGLYETRIDLSQLGGDSGGSKRTADGSEFEPKKKRKV

[0208] In some embodiments, the fusion protein comprises an amino acid sequence that is at least 60%, at least 65%, at least 70%, at least 75%, at least 80%, at least 85%, at least 90%, at least 95%, at least 96%, at least 97%, at least 98%, at least 99%, or at least 99.5% identical to any one of the amino acid sequences set forth in any one of SEQ ID NOs: 88-115, or to any of the fusion proteins provided herein. In some embodiments, the fusion protein comprises an amino acid sequence that has 1, 2, 3, 4, 5, 6, 7, 8, 9, 10, 11, 12, 13, 14, 15, 16, 17, 18, 19, 20, 21, 22, 21, 24, 25, 26, 27, 28, 29, 30, 31, 32, 33, 34, 35, 36, 37, 38, 39, 40, 41, 42, 43, 44, 45, 46, 47, 48, 49, 50, or more mutations compared to any one of the amino acid sequences set forth in SEQ ID NOs: 88-115, or any of the fusion proteins provided herein. In some embodiments, the fusion protein comprises an amino acid sequence that has at least 5, at least 10, at least 15, at least 20, at least 25, at least 30, at least 35, at least 40, at least 45, at least 50, at least 60, at least 70, at least 80, at least 90, at least 100, at least 110, at least 120, at least 130, at least 140, at least 150, at least 160, at least 170, at least 200, at least 300, at least 400, at least 500, at least 600, at least 700, at least 800, at least 900, at least 1000, at least 1100, at least 1200, at least 1300, at least 1400, at least 1500, at least 1600, at least 1700, at least 1750, or at least 1800 identical contiguous amino acid residues as compared to any one of the amino acid sequences set forth in SEQ ID NOs: 88-115, or any of the fusion proteins provided herein. In some embodiments, the fusion protein (base editor) comprises the amino acid sequence of SEQ ID NO: 115, or a variant thereof that is at least 60%, at least 65%, at least 70%, at least 75%, at least 80%, at least 85%, at least 90%, at least 95%, at least 96%, at least 97%, at least 98%, at least 99%, or at least 99.5% identical to SEQ ID NO: 115.

Complexes of Nucleic Acid Programmable DNA Binding Proteins (napDNAbp) with Guide Nucleic Acids

[0209] Some aspects of this disclosure provide complexes comprising any of the fusion proteins (e.g., base editor) provided herein, for example any of the adenosine base editors provided herein, and a guide nucleic acid bound to napDNAbp of the fusion protein. In some embodiments, the guide nucleic acid is any one of the guide RNAs provided herein. In some embodiments, the disclosure provides any of the fusion proteins (e.g., adenosine base editors) provided herein bound to any of the guide RNAs provided herein. In some embodiments, the napDNAbp of the fusion protein (e.g., adenosine base editor) is a Cas9 domain (e.g., a dCas9, a nuclease active Cas9, or a Cas9 nickase), which is bound to a guide RNA. In some embodiments, the complexes provided herein are configured to generate a mutation in a nucleic acid, for example to correct a point mutation in a gene (e.g., LMNA) to modulate expression of one or more proteins (e.g., lamin A).

[0210] In some embodiments, the guide RNA comprises a guide sequence that comprises at least 8, 9, 10, 11, 12, 13, 14, 15, 16, 17, 18, 19, 20, 21, 22, 23, 24, 25, 26, 27, 28, 29, or 30 contiguous nucleic acids that are 100% complementary to a target sequence, for example a target DNA sequence (e.g., a target DNA sequence of any one of SEQ ID NOs: 56-71). In some embodiments, the guide RNA comprises a guide sequence that comprises at least 8, 9, 10, 11, 12, 13, 14, 15, 16, 17, 18, 19, 20, 21, 22, 23, 24, 25, 26, 27, 28, 29, or 30 contiguous nucleic acids that are 100% complementary to a DNA sequence in a LMNA gene (e.g., a target DNA sequence of any one of SEQ ID NOs: 56-71), for example a region of a human LMNA gene. In some embodiments, the LMNA is the LMNA of Gene ID: 4000.

[0211] In some embodiments, any of the complexes provided herein comprise a gRNA having a guide sequence that comprises at least 8, 9, 10, 11, 12, 13, 14, 15, 16, 17, 18, 19, 20, 21, 22, 23, 24, 25, 26, 27, 28, 29, or 30 contiguous nucleic acids that are 100% complementary to any one of the nucleic acid sequences provided herein. It should be appreciated that the guide sequence of the gRNA may comprise one or more nucleotides that are not complementary to a target sequence. In some embodiments, the guide sequence of the gRNA is at the 5′ end of the gRNA. In some embodiments, the guide sequence of the gRNA further comprises a G at the 5′ end of the gRNA. In some embodiments, the G at the 5′ end of the gRNA is not complementary with the target sequence. In some embodiments, the guide sequence of the gRNA comprises 1, 2, 3, 4, 5, 6, 7, or 8 nucleotides that are not complementary to a target sequence (e.g., any of the target sequences provided herein (e.g., SEQ ID NOs: 56-71)). In some embodiments, the gRNA comprises the sequence of SEQ ID NO: 36, or the sequence of any one of SEQ ID NOs: 46-55, where the nucleotide target is indicated in bold. It should be appreciated that the T's indicated in the gRNA sequence of SEQ ID NO: 37 are uricils (Us) in the RNA sequence. Accordingly, in some embodiments, the gRNA comprises the sequence 5′-GGUCCACCCACCUGGGCUCC-3′ (SEQ ID NO: 36).

[0212] In some embodiments, the guide RNA comprises a guide sequence that comprises at least 8, 9, 10, 11, 12, 13, 14, 15, 16, 17, 18, 19, 20, 21, 22, 23, 24, 25, 26, 27, 28, 29, or 30 contiguous nucleic acids that are 100% complementary to a target sequence, for example a target DNA sequence in a LMNA gene. In some embodiments, the guide RNA comprises a guide sequence that comprises at least 8, 9, 10, 11, 12, 13, 14, 15, 16, 17, 18, 19, 20, 21, 22, 23, 24, 25, 26, 27, 28, 29, or 30 contiguous nucleic acids that are 100% complementary to a DNA sequence in a human LMNA gene. In some embodiments, the LMNA gene is a human, chimpanzee, ape, monkey, dog, mouse, or rat LMNS gene. In some embodiments, the LMNA gene is a human LMNA gene. In some embodiments, the LMNA gene is the LMNA gene of Gene ID: 4000, which has also been referred to as FPL; IDC; LFP; CDDC; EMD2; FPLD; HGPS; LDP1; LMN1; LMNC; MADA; PRO1; CDCD1; CMD1A; FPLD2; LMNL1; CMT2B1; or LGMD1B.

### II. The Guide Sequence (e.g., Guide RNA)

[0213] Some aspects of the invention relate to guide sequences that are capable of guiding a base editor to correct a mutation in LMNA (e.g., a C1824T point mutation in LMNA). In various embodiments base editors (e.g., base editors provided herein) can be complexed, bound, or otherwise associated with (e.g., via any type of covalent or non-covalent bond) one or more guide sequences, i.e., the sequence which becomes associated or bound to the base editor and directs its localization to a specific target sequence having complementarity to the guide sequence or a portion thereof. The particular design aspects of a guide sequence will depend upon the nucleotide sequence of a genomic target site of interest (e.g., the mutant T1824 residue of human LMNA) and the type of napDNA/RNAbp (e.g., type of Cas protein) present in the base editor, among other factors, such as PAM sequence locations, percent G/C content in the target sequence, the degree of microhomology regions, secondary structures, etc.

[0214] In general, a guide sequence is any polynucleotide sequence having sufficient complementarity with a target polynucleotide sequence to hybridize with the target sequence and direct sequence-specific binding of a napDNARNAbp (e.g., a Cas9, Cas9 homolog, or Cas9 variant) to the target sequence, such as a sequence within an LMNA gene that comprises a C1824T point mutation. In some embodiments, the degree of complementarity between a guide sequence and its corresponding target sequence (e.g., LMNA), when optimally aligned using a suitable alignment algorithm, is about or more than about 50%, 60%, 75%, 80%, 85%, 90%, 95%, 97.5%, 99%, or more. Optimal alignment may be determined with the use of any suitable algorithm for aligning sequences, non-limiting example of which include the Smith-Waterman algorithm, the Needleman-Wunsch algorithm, algorithms based on the Burrows-Wheeler Transform (e.g. the Burrows Wheeler Aligner), ClustalW, Clustal X, BLAT, Novoalign (Novocraft Technologies, ELAND (Illumina, San Diego, Calif.), SOAP (available at soap.genomics.org.cn), and Maq (available at maq.sourceforge.net). In some embodiments, a guide sequence is about or more than about 5, 10, 11, 12, 13, 14, 15, 16, 17, 18, 19, 20, 21, 22, 23, 24, 25, 26, 27, 28, 29, 30, 31, 32, 33, 34, 35, 40, 45, 50, 75, or more nucleotides in length.

[0215] In some embodiments, a guide sequence is less than about 75, 50, 45, 40, 35, 30, 25, 20, 15, 12, or fewer nucleotides in length. The ability of a guide sequence to direct sequence-specific binding of a base editor to a target sequence may be assessed by any suitable assay. For example, the components of a base editor, including the guide sequence to be tested, may be provided to a host cell having the corresponding target sequence (e.g., a HGADFN 167 or HGADFN 188 cell line), such as by transfection with vectors encoding the components of a base editor disclosed herein, followed by an assessment of preferential cleavage within the target sequence, such as by Surveyor assay as described herein. Similarly, cleavage of a target polynucleotide sequence may be evaluated in a test tube by providing the target sequence, components of a base editor, including the guide sequence to be tested and a control guide sequence different from the test guide sequence, and comparing binding or rate of cleavage at the target sequence between the test and control guide sequence reactions. Other assays are possible, and will occur to those skilled in the art.

[0216] In some embodiments, a guide sequence designed to target a C1824T point mutation in LMNA. In some embodiments, the target sequence is a LMNA sequence within a genome of a cell. An exemplary sequence within the human LMNA gene that contains a wild-type C1824 residue is provided below. It should be appreciated, however that additional exemplary LMNA gene sequences are within the scope of this disclosure and guide RNAs can be designed to accommodate any differences between LMNA sequences provided herein and any LMNA sequences, or variants thereof (e.g., mutants), found in nature.

Portion of Homo sapiens lamin A/C (LMNA) gene (SEQ ID NO: 34), RefSeqGene (LRG_254) on chromosome 1 (NCBI Reference Sequence: NG_008692.2) including the wild-type C1824 residue that, when mutated, leads to the development of Hutchinson-Gilford progeria syndrome (HGPS). The wild-type C1824 residue is indicated in bold.

(SEQ ID NO: 34)
5′-CAAGGCATCTGCCAGCGGCTCAGGAGCCCAGGTGGGCGGACCCATC
TCCTCTGGCTCTTCTGCCTCCAGTGTCACG-3′

[0217] An exemplary portion of Homo sapiens lamin A/C (LMNA) gene (SEQ ID NO: 35), RefSeqGene (LRG_254) on chromosome 1 (NCBI Reference Sequence: NG_008692.2), where the C1824 residue has been mutated to a T, is provided below. The mutant T1824 is indicated in bold. The underlined portion indicates the nucleic acid residues of mutant LMNA that is complementary to the nucleic residues of the guide sequence

(SEQ ID NO: 36)
5′-GGUCCACCCACCUGGGCUCC-3′
(SEQ ID NO: 35)
5′-CAAGGCATCTGCCAGCGGCTCAGGAGCCCAGGTGGGTGGACCCATC
TCCTCTGGCTCTTCTGCCTCCAGTGTCACG-3′

[0218] Additional exemplary portions of the LMNA gene include the following:

(SEQ ID NO: 57)
5′-CTCAGGAGCCCAGGTGGGTG-3′
(SEQ ID NO: 58)
5′-TCAGGAGCCCAGGTGGGTGG-3′
(SEQ ID NO: 59)
5′-CAGGAGCCCAGGTGGGTGGA-3′
(SEQ ID NO: 60)
5′-AGGAGCCCAGGTGGGTGGAC-3′
(SEQ ID NO: 56)
5′-GGAGCCCAGGTGGGTGGACC-3′
(SEQ ID NO: 61)
5′-GAGCCCAGGTGGGTGGACCC-3′
(SEQ ID NO: 62)
5′-AGCCCAGGTGGGTGGACCCA-3′
(SEQ ID NO: 63)
5′-GCCCAGGTGGGTGGACCCAT-3′
(SEQ ID NO: 64)
5′-CCCAGGTGGGTGGACCCATC-3′
(SEQ ID NO: 65)
5′-CCAGGTGGGTGGACCCATC-3′
(SEQ ID NO: 66)
5′-AGGAGCCCAGGTGGGTGGACCC-3′
(SEQ ID NO: 67)
5′-CAGGAGCCCAGGTGGGTGGACCCA-3′
(SEQ ID NO: 68)
5′-TCAGGAGCCCAGGTGGGTGGACCCAT-3′
(SEQ ID NO: 69)
5′-CTCAGGAGCCCAGGTGGGTGGACCCATC-3′
(SEQ ID NO: 70)
5′-GCTCAGGAGCCCAGGTGGGTGGACCCATCT-3′
(SEQ ID NO: 71)
5′-GGCTCAGGAGCCCAGGTGGGTGGACCCATCTC-3′

[0219] The disclosure also contemplates exemplary portions of the LMNA gene that are shorter or longer than any one of the exemplary portions of the LMNA gene provided in any one of SEQ ID NOs: 56-71. It should be appreciated that guide sequences may be engineered that are complementary (e.g., 100% complementary) to any of the exemplary portions of the LMNA gene provided herein (e.g., SEQ ID NOs: 56-71). In some embodiments, a guide sequence is complementary (e.g., 100% complementary) to any one of SEQ ID NOs: 56-71. In some embodiments, a guide sequence is complementary (e.g., 100% complementary) to a sequence of any one of SEQ ID NOs: 56-71 absent the first 1, 2, 3, 4, 5, 7, 8, 9, 10, 11, or 12 nucleic acid residues at the 5′ end. In some embodiments, a guide sequence is complementary (e.g., 100% complementary) to a sequence of any one of SEQ ID NOs: 56-71 absent the first 1, 2, 3, 4, 5, 7, 8, 9, 10, 11, or 12 nucleic acid residues at the 3′ end.

[0220] In some embodiments, a guide sequence is selected to reduce the degree of secondary structure within the guide sequence. Secondary structure may be determined by any suitable polynucleotide folding algorithm. Some programs are based on calculating the minimal Gibbs free energy. An example of one such algorithm is mFold, as described by Zuker and Stiegler (Nucleic Acids Res. 9 (1981), 133-148). Another example folding algorithm is the online webserver RNAfold, developed at Institute for Theoretical Chemistry at the University of Vienna, using the centroid structure prediction algorithm (see e.g. A. R. Gruber et al., 2008, Cell 106(1): 23-24; and P A Carr and G M Church, 2009, Nature Biotechnology 27(12): 1151-62). Further algorithms may be found in U.S. application Ser. No. 61/836,080; Broad Reference BI-2013/004A); incorporated herein by reference.

[0221] In general, a tracr mate sequence includes any sequence that has sufficient complementarity with a tracr sequence to promote one or more of: (1) excision of a guide sequence flanked by tracr mate sequences in a cell containing the corresponding tracr sequence; and (2) formation of a complex at a target sequence, wherein the complex comprises the tracr mate sequence hybridized to the tracr sequence. In general, degree of complementarity is with reference to the optimal alignment of the tracr mate sequence and tracr sequence, along the length of the shorter of the two sequences. Optimal alignment may be determined by any suitable alignment algorithm, and may further account for secondary structures, such as self-complementarity within either the tracr sequence or tracr mate sequence. In some embodiments, the degree of complementarity between the tracr sequence and tracr mate sequence along the length of the shorter of the two when optimally aligned is about or more than about 25%, 30%, 40%, 50%, 60%, 70%, 80%, 90%, 95%, 97.5%, 99%, or higher. In some embodiments, the tracr sequence is about or more than about 5, 6, 7, 8, 9, 10, 11, 12, 13, 14, 15, 16, 17, 18, 19, 20, 25, 30, 40, 50, or more nucleotides in length. In some embodiments, the tracr sequence and tracr mate sequence are contained within a single transcript, such that hybridization between the two produces a transcript having a secondary structure, such as a hairpin. Preferred loop forming sequences for use in hairpin structures are four nucleotides in length, and most preferably have the sequence GAAA. However, longer or shorter loop sequences may be used, as may alternative sequences. The sequences preferably include a nucleotide triplet (for example, AAA), and an additional nucleotide (for example C or G). Examples of loop forming sequences include CAAA and AAAG. In an embodiment of the invention, the transcript or transcribed polynucleotide sequence has at least two or more hairpins. In preferred embodiments, the transcript has two, three, four or five hairpins. In a further embodiment of the invention, the transcript has at most five hairpins. In some embodiments, the single transcript further includes a transcription termination sequence; preferably this is a polyT sequence, for example six T nucleotides. Further non-limiting examples of single polynucleotides comprising a guide sequence, a tracr mate sequence, and a tracr sequence are as follows (listed 5′ to 3′), where “N” represents a base of a guide sequence, the first block of lower case letters represent the tracr mate sequence, and the second block of lower case letters represent the tracr sequence, and the final poly-T sequence represents the transcription terminator: (1) NNNNNNNNgtttttgtactctcaagatttaGAAAtaaatcttgcagaagctacaaagataaggctt catgccgaaatcaacaccctgtcattttatggcagggtgttttcgttatttaaTTTTTT (SEQ ID NO: 38); (2) NNNNNNNNNNNNNNNNNNgtttttgtactctcaGAAAtgcagaagctacaaagataaggcttcatgcc gaaatca acaccctgtcattttatggcagggtgttttcgttatttaaTTTTTT (SEQ ID NO: 39); (3) NNNNNNNNNNNNNNNNNNNNgtttttgtactctcaGAAAtgcagaagctacaaagataaggcttcat gccgaaatca acaccctgtcattttatggcagggtgtTTTTT (SEQ ID NO: 40); (4) NNNNNNNNNNNNNNNNNNNNgttttagagctaGAAAtagcaagttaaaataaggctagtccgttatc aacttgaaaa agtggcaccgagtcggtgcTTTTTT (SEQ ID NO: 41); (5) NNNNNNNNNNNNNNNNNNNNgttttagagctaGAAATAGcaagttaaaataaggctagtccgttat caacttgaa aaagtgTTTTTTT (SEQ ID NO: 42); and (6) NNNNNNNNNNNNNNNNNNNNgttttagagctagAAATAGcaagttaaaataaggctagtccgttat caTTTTT TTT (SEQ ID NO: 43). In some embodiments, sequences (1) to (3) are used in combination with Cas9 from S. thermophilus CRISPR1. In some embodiments, sequences (4) to (6) are used in combination with Cas9 from S. pyogenes. In some embodiments, the tracr sequence is a separate transcript from a transcript comprising the tracr mate sequence.

[0222] It will be apparent to those of skill in the art that in order to target any of the fusion proteins comprising a Cas9 domain and an adenosine deaminase, as disclosed herein, to a target site, e.g., a site comprising a C1824T point mutation in LMNA to be edited, it is typically necessary to co-express the fusion protein together with a guide RNA, e.g., an sgRNA. As explained in more detail elsewhere herein, a guide RNA typically comprises a tracrRNA framework allowing for Cas9 binding, and a guide sequence, which confers sequence specificity to the Cas9:nucleic acid editing enzyme/domain fusion protein.

[0223] In some embodiments, the guide RNA comprises a structure 5′-[guide sequence]-[Cas9-binding sequence]-3′, where the Cas9 binding sequence comprises a nucleic acid sequence that is at least 70%, 75%, 80%, 85%, 90%, 95%, 96%, 97%, 98%, 99%, or 99.5% identical to SEQ ID NO: 44 or 45, or SEQ ID NO: 44 or 45 absent the poly-U terminator sequence at the 3′ end. In some embodiments, the guide RNA comprises a structure 5′-[guide sequence]-[Cas9-binding sequence]-3′, where the Cas9 binding sequence comprises a nucleic acid sequence SEQ ID NO: 44, SEQ ID NO: 45, or SEQ ID NO: 44 or 45 absent the poly-U terminator sequence at the 3′ end.

(SEQ ID NO: 44)
5′GUUUUAGAGCUAGAAAUAGCAAGUUAAAAUAAAGGCUAGUCCGUUAU
CAACUUGAAAAAGUGGCACCGAGUCGGUGCUUUUU-3′
(SEQ ID NO: 45)
5′GUUUUAGAGCUAGAAAUAGCAAGUUAAAAUAAGGCUAGUCCGUUAUC
AACUUGAAAAAGUGGCACCGAGUCGGUGCUUUUUUU-3′

[0224] In some embodiments, the guide RNA comprises a nucleic acid sequence that is at least 70%, 75%, 80%, 85%, 90%, 95%, 96%, 97%, 98%, 99%, or 99.5% identical to SEQ ID NO: 72, or SEQ ID NO: 72 absent the poly-U terminator sequence at the 3′ end. In some embodiments, the guide RNA comprises the nucleic acid sequence SEQ ID NO: 72, or SEQ ID NO: 72 absent the poly-U terminator sequence at the 3′ end.

[0225] In some embodiments, the guide RNA comprises the nucleic acid sequence

(SEQ ID NO: 72)
5′GGUCCACCCACCUGGGCUCCGUUUUAGAGCUAGAAAUAGCAAGUUAA
AAUAAGGCUAGUCCGUUAUCAACUUGAAAAAGUGGCACCGAGUCGGUGC
UUUUUUU-3′

[0226] The guide sequence is typically approximately 20 nucleotides long. Exemplary guide sequences for targeting a base editor (e.g., ABEmax) to a site comprising a C1824T point mutation in LMNA are provided below. It should be appreciated, however, that changes to such guide sequences can be made based on the specific LMNA sequence found within a cell, for example the cell of a patient having Hutchinson-Gilford progeria syndrome (HGPS). Such suitable guide RNA sequences typically comprise guide sequences that are complementary to a nucleic sequence within 50 nucleotides upstream or downstream of the target nucleotide to be edited.

Exemplary guide sequences to target a C1824T point mutation in LMNA:

(SEQ ID NO: 46)
5′-GAGAUGGGUCCACCCACCUGGGCUCC-3′
(SEQ ID NO: 47)
5′-GGAUGGGUCCACCCACCUGGGCUCC-3′
(SEQ ID NO: 48)
5′-GAUGGGUCCACCCACCUGGGCUCC-3′
(SEQ ID NO: 49)
5′-GUGGGUCCACCCACCUGGGCUCC-3′
(SEQ ID NO: 50)
5′-GGGGUCCACCCACCUGGGCUCC-3′
(SEQ ID NO: 51)
5′-GGGUCCACCCACCUGGGCUCC-3′
(SEQ ID NO: 36)
5′-GGUCCACCCACCUGGGCUCC-3′
(SEQ ID NO: 52)
5′-GUCCACCCACCUGGGCUCC-3′
(SEQ ID NO: 53)
5′-GCCACCCACCUGGGCUCC-3′
(SEQ ID NO: 54)
5′-GCACCCACCUGGGCUCC-3′
(SEQ ID NO: 55)
5′-GACCCACCUGGGCUCC-3′

[0227] For each of the exemplary guide sequences provided above (e.g., SEQ ID NOs: 36 and 46-55), the A that is complementary to the mutant T of T1824 in LMNA is shown in bold.

[0228] The disclosure also provides guide sequences that are truncated variants of any of the guide sequences provided herein (e.g., SEQ ID NOs: 36 and 46-55). In some embodiments, the guide sequence comprises the amino acid sequence of any one of SEQ ID NOs: 36 and 46-55, absent the first 1, 2, 3, 4, 5, 6, 7, 8, 9, or 10 nucleic acid residues from the 5′ end. It should be appreciated that any of the 5′ truncated guide sequences provided herein may further comprise a G residue at the 5′ end. In some embodiments, the guide sequence comprises the amino acid sequence of any one of SEQ ID NOs: 36 and 46-55, absent the first 1, 2, 3, 4, 5, 6, 7, 8, 9, 10, 11, or 12 nucleic acid residues from the 3′ end.

[0229] The disclosure also provides guide sequences that are longer variants of any of the guide sequences provided herein (e.g., SEQ ID NOs: 36 and 46-55). In some embodiments, the guide sequence comprises one additional residue that is 5′-U-3′ at the 3′ end of any one of SEQ ID NOs: 36 and 46-55. In some embodiments, the guide sequence comprises two additional residues that are 5′-UG-3′ at the 3′ end of any one of SEQ ID NOs: 36 and 46-55. In some embodiments, the guide sequence comprises three additional residues that are 5′-UGA-3′ at the 3′ end of any one of SEQ ID NOs: 36 and 46-55. In some embodiments, the guide sequence comprises four additional residues that are 5′-UGAG-3′ at the 3′ end of any one of SEQ ID NOs: 36 and 46-55. In some embodiments, the guide sequence comprises five additional residues that are 5′-UGAGC-3′ at the 3′ end of any one of SEQ ID NOs: 36 and 46-55. In some embodiments, the guide sequence comprises six additional residues that are 5′-UGAGCC-3′ at the 3′ end of any one of SEQ ID NOs: 36 and 46-55. In some embodiments, the guide sequence comprises seven additional residues that are 5′-UGAGCCG-3′ at the 3′ end of any one of SEQ ID NOs: 36 and 46-55. In some embodiments, the guide sequence comprises eight additional residues that are 5′-UGAGCCGC-3′ at the 3′ end of any one of SEQ ID NOs: 36 and 46-55. In some embodiments, the guide sequence comprises nine additional residues that are 5′-UGAGCCGCU-3′ at the 3′ end of any one of SEQ ID NOs: 36 and 46-55. In some embodiments, the guide sequence comprises ten additional residues that are 5′-UGAGCCGCUG-3′ (SEQ ID NO: 121) at the 3′ end of any one of SEQ ID NOs: 36 and 46-55. In some embodiments, the guide sequence comprises eleven additional residues that are 5′-UGAGCCGCUGG-3′ (SEQ ID NO: 116) at the 3′ end of any one of SEQ ID NOs: 36 and 46-55.

Methods of Using Fusion Proteins (Base Editors) Comprising an Adenosine Deaminase and a Nucleic Acid Programmable DNA Binding Protein (napDNAbp) Domain

[0230] Some aspects of this disclosure provide methods of using the fusion proteins, or complexes comprising a guide nucleic acid (e.g., gRNA) and a nucleobase editor provided herein. For example, some aspects of this disclosure provide methods comprising contacting a DNA, or RNA molecule with any of the fusion proteins provided herein, and with at least one guide nucleic acid (e.g., guide RNA), wherein the guide nucleic acid, (e.g., guide RNA) is comprises a sequence (e.g., a guide sequence that binds to a DNA target sequence) of at least 10 (e.g., at least 10, 15, 20, 25, or 30) contiguous nucleotides that is 100% complementary to a target sequence (e.g., any of the target LMNA sequences provided herein). In some embodiments, the 3′ end of the target sequence is immediately adjacent to a canonical PAM sequence (NGG). In some embodiments, the 3′ end of the target sequence is not immediately adjacent to a canonical PAM sequence (NGG). In some embodiments, the 3′ end of the target sequence is immediately adjacent to an AGC, GAG, TTT, GTG, or CAA sequence.

### Correcting Mutations in an LMNA Gene

[0231] Some aspects of the disclosure provide methods of using base editors (e.g., any of the fusion proteins provided herein) and gRNAs to correct a point mutation (e.g., a C1824T mutation) in an LMNA gene. Exemplary portions of a human LMNA gene comprising a T at position 1824 (indicated in bold) are provided in SEQ ID NOs: 56-71. In some embodiments, the disclosure provides methods of using base editors (e.g., any of the fusion proteins provided herein) and gRNAs to generate an A to G and/or T to C mutation in an LMNA gene. In some embodiments, the disclosure provides method for deaminating an adenosine nucleobase (A) in an LMNA gene, the method comprising contacting the LMNA gene with a base editor and a guide RNA bound to the base editor, where the guide RNA comprises a guide sequence that is complementary to a target nucleic acid sequence in the LMNA gene. In some embodiments, the LMNA gene comprises a C to T or G to A mutation. In some embodiments, the C to T or G to A mutation in the LMNA gene impairs function of the LMNA protein encoded by the LMNA gene. In some embodiments, the C to T or G to A mutation in the LMNA gene impairs function of the LMNA protein encoded by the LMNA gene by at least 1%, 2%, 5%, 10%, 15%, 20%, 25%, 30%, 35%, 40%, 45%, 50%, 55%, 60%, 65%, 70%, 75%, 80%, 85%, 90%, 95%, 98%, or at least 99%.

[0232] In some embodiments, deaminating an adenosine (A) nucleobase complementary to the T corrects the C to T or G to A mutation in the LMNA gene. In some embodiments, the C to T or G to A mutation in the LMNA gene leads to a Cys (C) to Tyr (Y) mutation in the LMNA protein encoded by the LMNA gene. In some embodiments, deaminating the adenosine nucleobase complementary to the T corrects the Cys to Tyr mutation in the LMNA protein.

[0233] In some embodiments, the guide sequence of the gRNA comprises at least 8, 9, 10, 11, 12, 13, 14, 15, 16, 17, 18, 19, 20, 21, 22, 23, 24, 25, 26, 27, 28, 29, 30, 31, 32, 33, 34, or 35 contiguous nucleic acids that are 100% complementary to a target nucleic acid sequence of the LMNA gene. In some embodiments, the base editor nicks the target sequence that is complementary to the guide sequence.

[0234] In some embodiments, the target DNA sequence comprises a sequence associated with a disease or disorder, e.g., Hutchinson-Gilford progeria syndrome. In some embodiments, the target DNA sequence comprises a point mutation associated with a disease or disorder. In some embodiments, the activity of the fusion protein (e.g., comprising an adenosine deaminase and a Cas9 domain), or the complex, results in a correction of the point mutation. In some embodiments, the target DNA sequence comprises a G→A or C→T point mutation associated with a disease or disorder, and wherein the deamination of the mutant A base results in a sequence that is not associated with a disease or disorder. In some embodiments, the target DNA sequence encodes a protein, and the point mutation is in a codon and results in a change in the amino acid encoded by the mutant codon as compared to the wild-type codon. In some embodiments, the deamination of the mutant A results in a change of the amino acid encoded by the mutant codon. In some embodiments, the deamination of the mutant A results in the codon encoding the wild-type amino acid. In some embodiments, the contacting is in vivo in a subject. In some embodiments, the subject has or has been diagnosed with a disease or disorder.

[0235] Some embodiments provide methods for using the DNA editing fusion proteins provided herein. In some embodiments, the fusion protein is used to introduce a point mutation into a nucleic acid by deaminating a target nucleobase, e.g., an A residue. In some embodiments, the deamination of the target nucleobase results in the correction of a genetic defect, e.g., in the correction of a point mutation that leads to a loss of function in a gene product. In some embodiments, the genetic defect is associated with a disease or disorder, e.g., HGPS.

[0236] In some embodiments, the purpose of the methods provided herein is to restore the function of a dysfunctional gene via genome editing. The nucleobase editing proteins provided herein can be validated for gene editing-based human therapeutics in vitro, e.g., by correcting a disease-associated mutation in human cell culture. It will be understood by the skilled artisan that the nucleobase editing proteins provided herein, e.g., the fusion proteins comprising a nucleic acid programmable DNA binding protein (e.g., Cas9) and an adenosine deaminase domain can be used to correct any single point G to A or C to T mutation. In the first case, deamination of the mutant A to I corrects the mutation, and in the latter case, deamination of the A that is base-paired with the mutant T, followed by a round of replication or followed by base editing repair activity, corrects the mutation.

[0237] The instant disclosure provides methods for the treatment of a subject diagnosed with a disease associated with or caused by a point mutation that can be corrected by a DNA editing fusion protein provided herein. For example, in some embodiments, a method is provided that comprises administering to a subject having such a disease, e.g., progeria. In some embodiments, the disease is a genetic disease. In some embodiments, the disease is a disease associated with progeria

[0238] In some embodiments, a fusion protein recognizes canonical PAMs and therefore can correct the pathogenic G to A or C to T mutations with canonical PAMs, e.g., NGG, respectively, in the flanking sequences. For example, Cas9 proteins that recognize canonical PAMs comprise an amino acid sequence that is at least 80%, 85%, 90%, 95%, 97%, 98%, or 99% identical to the amino acid sequence of Streptococcus pyogenes Cas9 as provided by any one of SEQ ID NOs: 11-13, or to a fragment thereof comprising the RuvC and HNH domains of any one of SEQ ID NO: 11-13.

It will be apparent to those of skill in the art that in order to target any of the fusion proteins comprising a Cas9 domain and an adenosine deaminase, as disclosed herein, to a target site, e.g., a site comprising a point mutation to be edited, it is typically necessary to co-express the fusion protein together with a guide RNA, e.g., an sgRNA. As explained in more detail elsewhere herein, a guide RNA typically comprises a tracrRNA framework allowing for Cas9 binding, and a guide sequence, which confers sequence specificity to the Cas9:nucleic acid editing enzyme/domain fusion protein. In some embodiments, the guide RNA comprises a structure 5′-[guide sequence]-GUUUUAGAGCUAGAAAUAGCAAGUUAAAAUAAAGGCUAGUCCGUUAUCAACU UGAAAAAGUGGCACCGAGUCGGUGCUUUUU-3′ (SEQ ID NO: 44); or 5′-[guide sequence]-GUUUUAGAGCUAGAAAUAGCAAGUUAAAAUAAGGCUAGUCCGUUAUCAACUU GAAAAAGUGGCACCGAGUCGGUGCUUUUUUU-3′ (SEQ ID NO: 45), wherein the guide sequence comprises a sequence that is complementary to the target sequence. In some embodiments, the guide sequence comprises the sequence 5′-GGTCCACCCACCTGGGCTCC-3′ (SEQ ID NO: 37), where the nucleotide target is indicated in bold. It should be appreciated that the T's indicated in the gRNA sequence are uricils (Us) in the RNA sequence. Accordingly, in some embodiments, the gRNA comprises the sequence 5′-GGUCCACCCACCUGGGCUCC-3′ (SEQ ID NO: 36).

### Base Editor Efficiency

[0239] Some aspects of the disclosure are based on the recognition that any of the base editors provided herein are capable of modifying a specific nucleotide base without generating a significant proportion of indels. An “indel”, as used herein, refers to the insertion or deletion of a nucleotide base within a nucleic acid. Such insertions or deletions can lead to frame shift mutations within a coding region of a gene. In some embodiments, it is desirable to generate base editors that efficiently modify (e.g. mutate or deaminate) a specific nucleotide within a nucleic acid, without generating a large number of insertions or deletions (i.e., indels) in the nucleic acid. In certain embodiments, any of the base editors provided herein are capable of generating a greater proportion of intended modifications (e.g., point mutations or deaminations) versus indels. In some embodiments, the base editors provided herein are capable of generating a ratio of intended point mutations to indels that is greater than 1:1. In some embodiments, the base editors provided herein are capable of generating a ratio of intended point mutations to indels that is at least 1.5:1, at least 2:1, at least 2.5:1, at least 3:1, at least 3.5:1, at least 4:1, at least 4.5:1, at least 5:1, at least 5.5:1, at least 6:1, at least 6.5:1, at least 7:1, at least 7.5:1, at least 8:1, at least 10:1, at least 12:1, at least 15:1, at least 20:1, at least 25:1, at least 30:1, at least 40:1, at least 50:1, at least 100:1, at least 200:1, at least 300:1, at least 400:1, at least 500:1, at least 600:1, at least 700:1, at least 800:1, at least 900:1, or at least 1000:1, or more. The number of intended mutations and indels may be determined using any suitable method, for example the methods used in the below Examples. In some embodiments, to calculate indel frequencies, sequencing reads are scanned for exact matches to two 10-bp sequences that flank both sides of a window in which indels might occur. If no exact matches are located, the read is excluded from analysis. If the length of this indel window exactly matches the reference sequence the read is classified as not containing an indel. If the indel window is two or more bases longer or shorter than the reference sequence, then the sequencing read is classified as an insertion or deletion, respectively.

[0240] In some embodiments, the base editors provided herein are capable of limiting formation of indels in a region of a nucleic acid. In some embodiments, the region is at a nucleotide targeted by a base editor or a region within 2, 3, 4, 5, 6, 7, 8, 9, or 10 nucleotides of a nucleotide targeted by a base editor. In some embodiments, any of the base editors provided herein are capable of limiting the formation of indels at a region of a nucleic acid to less than 1%, less than 1.5%, less than 2%, less than 2.5%, less than 3%, less than 3.5%, less than 4%, less than 4.5%, less than 5%, less than 6%, less than 7%, less than 8%, less than 9%, less than 10%, less than 12%, less than 15%, or less than 20%. The number of indels formed at a nucleic acid region may depend on the amount of time a nucleic acid (e.g., a nucleic acid within the genome of a cell) is exposed to a base editor. In some embodiments, an number or proportion of indels is determined after at least 1 hour, at least 2 hours, at least 6 hours, at least 12 hours, at least 24 hours, at least 36 hours, at least 48 hours, at least 3 days, at least 4 days, at least 5 days, at least 7 days, at least 10 days, or at least 14 days of exposing a nucleic acid (e.g., a nucleic acid within the genome of a cell) to a base editor.

[0241] Some aspects of the disclosure are based on the recognition that any of the base editors provided herein are capable of efficiently generating an intended mutation, such as a point mutation, in a nucleic acid (e.g. a nucleic acid within a genome of a subject) without generating a significant number of unintended mutations, such as unintended point mutations. In some embodiments, a intended mutation is a mutation that is generated by a specific base editor bound to a gRNA, specifically designed to generate the intended mutation. In some embodiments, the intended mutation is a mutation associated with a disease or disorder. In some embodiments, the intended mutation is a adenine (A) to guanine (G) point mutation associated with a disease or disorder. In some embodiments, the intended mutation is a thymine (T) to cytosine (C) point mutation associated with a disease or disorder. In some embodiments, the intended mutation is a adenine (A) to guanine (G) point mutation within the coding region of a gene. In some embodiments, the intended mutation is a thymine (T) to cytosine (C) point mutation within the coding region of a gene. In some embodiments, the intended mutation is a point mutation that generates a stop codon, for example, a premature stop codon within the coding region of a gene. In some embodiments, the intended mutation is a mutation that eliminates a stop codon. In some embodiments, the intended mutation is a mutation that alters the splicing of a gene. In some embodiments, the intended mutation is a mutation that alters the regulatory sequence of a gene (e.g., a gene promotor or gene repressor). In some embodiments, any of the base editors provided herein are capable of generating a ratio of intended mutations to unintended mutations (e.g., intended point mutations:unintended point mutations) that is greater than 1:1. In some embodiments, any of the base editors provided herein are capable of generating a ratio of intended mutations to unintended mutations (e.g., intended point mutations:unintended point mutations) that is at least 1.5:1, at least 2:1, at least 2.5:1, at least 3:1, at least 3.5:1, at least 4:1, at least 4.5:1, at least 5:1, at least 5.5:1, at least 6:1, at least 6.5:1, at least 7:1, at least 7.5:1, at least 8:1, at least 10:1, at least 12:1, at least 15:1, at least 20:1, at least 25:1, at least 30:1, at least 40:1, at least 50:1, at least 100:1, at least 150:1, at least 200:1, at least 250:1, at least 500:1, or at least 1000:1, or more. It should be appreciated that the characteristics of the base editors described in the “Base Editor Efficiency” section, herein, may be applied to any of the fusion proteins, or methods of using the fusion proteins provided herein.

### Methods for Editing Nucleic Acids

[0242] Some aspects of the disclosure provide methods for editing a nucleic acid. In some embodiments, the method is a method for editing a nucleobase of a nucleic acid (e.g., a base pair of a double-stranded DNA sequence). In some embodiments, the method comprises the steps of: a) contacting a target region of a nucleic acid (e.g., a double-stranded DNA sequence) with a complex comprising a base editor (e.g., a Cas9 domain fused to an adenosine deaminase) and a guide nucleic acid (e.g., gRNA), wherein the target region comprises a targeted nucleobase pair, b) inducing strand separation of said target region, c) converting a first nucleobase of said target nucleobase pair in a single strand of the target region to a second nucleobase, and d) cutting no more than one strand of said target region, where a third nucleobase complementary to the first nucleobase base is replaced by a fourth nucleobase complementary to the second nucleobase. In some embodiments, the method results in less than 20% indel formation in the nucleic acid. It should be appreciated that in some embodiments, step b is omitted. In some embodiments, the first nucleobase is an adenine. In some embodiments, the second nucleobase is a deaminated adenine, or inosine. In some embodiments, the third nucleobase is a thymine. In some embodiments, the fourth nucleobase is a cytosine. In some embodiments, the method results in less than 19%, 18%, 16%, 14%, 12%, 10%, 8%, 6%, 4%, 2%, 1%, 0.5%, 0.2%, or less than 0.1% indel formation. In some embodiments, the method further comprises replacing the second nucleobase with a fifth nucleobase that is complementary to the fourth nucleobase, thereby generating an intended edited base pair (e.g., A:T to G:C). In some embodiments, the fifth nucleobase is a guanine. In some embodiments, at least 5% of the intended base pairs are edited. In some embodiments, at least 10%, 15%, 20%, 25%, 30%, 35%, 40%, 45%, or 50% of the intended base pairs are edited.

[0243] In some embodiments, the ratio of intended products to unintended products in the target nucleotide is at least 2:1, 5:1, 10:1, 20:1, 30:1, 40:1, 50:1, 60:1, 70:1, 80:1, 90:1, 100:1, or 200:1, or more. In some embodiments, the ratio of intended point mutation to indel formation is greater than 1:1, 10:1, 50:1, 100:1, 500:1, or 1000:1, or more. In some embodiments, the cut single strand (nicked strand) is hybridized to the guide nucleic acid. In some embodiments, the cut single strand is opposite to the strand comprising the first nucleobase. In some embodiments, the base editor comprises a Cas9 domain. In some embodiments, the first base is adenine, and the second base is not a G, C, A, or T. In some embodiments, the second base is inosine. In some embodiments, the first base is adenine. In some embodiments, the second base is not a G, C, A, or T. In some embodiments, the second base is inosine. In some embodiments, the base editor inhibits base excision repair of the edited strand. In some embodiments, the base editor protects or binds the non-edited strand. In some embodiments, the base editor comprises UGI activity. In some embodiments, the base editor comprises a catalytically inactive inosine-specific nuclease. In some embodiments, the base editor comprises nickase activity. In some embodiments, the intended edited base pair is upstream of a PAM site. In some embodiments, the intended edited base pair is 1, 2, 3, 4, 5, 6, 7, 8, 9, 10, 11, 12, 13, 14, 15, 16, 17, 18, 19, or 20 nucleotides upstream of the PAM site. In some embodiments, the intended edited base pair is downstream of a PAM site. In some embodiments, the intended edited base pair is 1, 2, 3, 4, 5, 6, 7, 8, 9, 10, 11, 12, 13, 14, 15, 16, 17, 18, 19, or 20 nucleotides downstream stream of the PAM site. In some embodiments, the method does not require a canonical (e.g., NGG) PAM site. In some embodiments, the nucleobase editor comprises a linker. In some embodiments, the linker is 1-25 amino acids in length. In some embodiments, the linker is 5-20 amino acids in length. In some embodiments, linker is 10, 11, 12, 13, 14, 15, 16, 17, 18, 19, or 20 amino acids in length. In some embodiments, the target region comprises a target window, wherein the target window comprises the target nucleobase pair. In some embodiments, the target window comprises 1-10 nucleotides. In some embodiments, the target window is 1-9, 1-8, 1-7, 1-6, 1-5, 1-4, 1-3, 1-2, or 1 nucleotides in length. In some embodiments, the target window is 1, 2, 3, 4, 5, 6, 7, 8, 9, 10, 11, 12, 13, 14, 15, 16, 17, 18, 19, or 20 nucleotides in length. In some embodiments, the intended edited base pair is within the target window. In some embodiments, the target window comprises the intended edited base pair. In some embodiments, the method is performed using any of the base editors provided herein. In some embodiments, a target window is a deamination window.

[0244] In some embodiments, the disclosure provides methods for editing a nucleotide. In some embodiments, the disclosure provides a method for editing a nucleobase pair of a double-stranded DNA sequence. In some embodiments, the method comprises a) contacting a target region of the double-stranded DNA sequence with a complex comprising a base editor and a guide nucleic acid (e.g., gRNA), where the target region comprises a target nucleobase pair, b) inducing strand separation of said target region, c) converting a first nucleobase of said target nucleobase pair in a single strand of the target region to a second nucleobase, d) cutting no more than one strand of said target region, wherein a third nucleobase complementary to the first nucleobase base is replaced by a fourth nucleobase complementary to the second nucleobase, and the second nucleobase is replaced with a fifth nucleobase that is complementary to the fourth nucleobase, thereby generating an intended edited base pair, wherein the efficiency of generating the intended edited base pair is at least 5%. It should be appreciated that in some embodiments, step b is omitted. In some embodiments, at least 5% of the intended base pairs are edited. In some embodiments, at least 10%, 15%, 20%, 25%, 30%, 35%, 40%, 45%, or 50% of the intended base pairs are edited. In some embodiments, the method causes less than 19%, 18%, 16%, 14%, 12%, 10%, 8%, 6%, 4%, 2%, 1%, 0.5%, 0.2%, or less than 0.1% indel formation. In some embodiments, the ratio of intended product to unintended products at the target nucleotide is at least 2:1, 5:1, 10:1, 20:1, 30:1, 40:1, 50:1, 60:1, 70:1, 80:1, 90:1, 100:1, or 200:1, or more. In some embodiments, the ratio of intended point mutation to indel formation is greater than 1:1, 10:1, 50:1, 100:1, 500:1, or 1000:1, or more. In some embodiments, the cut single strand is hybridized to the guide nucleic acid. In some embodiments, the cut single strand is opposite to the strand comprising the first nucleobase. In some embodiments, the first base is adenine. In some embodiments, the second nucleobase is not G, C, A, or T. In some embodiments, the second base is inosine. In some embodiments, the base editor inhibits base excision repair of the edited strand. In some embodiments, the base editor protects (e.g., form base excision repair) or binds the non-edited strand. In some embodiments, the nucleobase editor comprises UGI activity. In some embodiments, the base editor comprises a catalytically inactive inosine-specific nuclease. In some embodiments, the nucleobase editor comprises nickase activity. In some embodiments, the intended edited base pair is upstream of a PAM site. In some embodiments, the intended edited base pair is 1, 2, 3, 4, 5, 6, 7, 8, 9, 10, 11, 12, 13, 14, 15, 16, 17, 18, 19, or 20 nucleotides upstream of the PAM site. In some embodiments, the intended edited base pair is downstream of a PAM site. In some embodiments, the intended edited base pair is 1, 2, 3, 4, 5, 6, 7, 8, 9, 10, 11, 12, 13, 14, 15, 16, 17, 18, 19, or 20 nucleotides downstream stream of the PAM site. In some embodiments, the method does not require a canonical (e.g., NGG) PAM site. In some embodiments, the nucleobase editor comprises a linker. In some embodiments, the linker is 1-25 amino acids in length. In some embodiments, the linker is 5-20 amino acids in length. In some embodiments, the linker is 10, 11, 12, 13, 14, 15, 16, 17, 18, 19, or 20 amino acids in length. In some embodiments, the target region comprises a target window, wherein the target window comprises the target nucleobase pair. In some embodiments, the target window comprises 1-10 nucleotides. In some embodiments, the target window is 1-9, 1-8, 1-7, 1-6, 1-5, 1-4, 1-3, 1-2, or 1 nucleotides in length. In some embodiments, the target window is 1, 2, 3, 4, 5, 6, 7, 8, 9, 10, 11, 12, 13, 14, 15, 16, 17, 18, 19, or 20 nucleotides in length. In some embodiments, the intended edited base pair occurs within the target window. In some embodiments, the target window comprises the intended edited base pair. In some embodiments, the nucleobase editor is any one of the base editors provided herein.

### Pharmaceutical Compositions

[0245] Other aspects of the present disclosure relate to pharmaceutical compositions comprising any of the adenosine deaminases, fusion proteins, or the fusion protein-gRNA complexes described herein. The term “pharmaceutical composition”, as used herein, refers to a composition formulated for pharmaceutical use. In some embodiments, the pharmaceutical composition further comprises a pharmaceutically acceptable carrier. In some embodiments, the pharmaceutical composition comprises additional agents (e.g. for specific delivery, increasing half-life, or other therapeutic compounds).

[0246] As used here, the term “pharmaceutically-acceptable carrier” means a pharmaceutically-acceptable material, composition or vehicle, such as a liquid or solid filler, diluent, excipient, manufacturing aid (e.g., lubricant, talc magnesium, calcium or zinc stearate, or steric acid), or solvent encapsulating material, involved in carrying or transporting the compound from one site (e.g., the delivery site) of the body, to another site (e.g., organ, tissue or portion of the body). A pharmaceutically acceptable carrier is “acceptable” in the sense of being compatible with the other ingredients of the formulation and not injurious to the tissue of the subject (e.g., physiologically compatible, sterile, physiologic pH, etc.). Some examples of materials which can serve as pharmaceutically-acceptable carriers include: (1) sugars, such as lactose, glucose and sucrose; (2) starches, such as corn starch and potato starch; (3) cellulose, and its derivatives, such as sodium carboxymethyl cellulose, methylcellulose, ethyl cellulose, microcrystalline cellulose and cellulose acetate; (4) powdered tragacanth; (5) malt; (6) gelatin; (7) lubricating agents, such as magnesium stearate, sodium lauryl sulfate and talc; (8) excipients, such as cocoa butter and suppository waxes; (9) oils, such as peanut oil, cottonseed oil, safflower oil, sesame oil, olive oil, corn oil and soybean oil; (10) glycols, such as propylene glycol; (11) polyols, such as glycerin, sorbitol, mannitol and polyethylene glycol (PEG); (12) esters, such as ethyl oleate and ethyl laurate; (13) agar; (14) buffering agents, such as magnesium hydroxide and aluminum hydroxide; (15) alginic acid; (16) pyrogen-free water; (17) isotonic saline; (18) Ringer's solution; (19) ethyl alcohol; (20) pH buffered solutions; (21) polyesters, polycarbonates and/or polyanhydrides; (22) bulking agents, such as polypeptides and amino acids (23) serum component, such as serum albumin, HDL and LDL; (22) C2-C12 alcohols, such as ethanol; and (23) other non-toxic compatible substances employed in pharmaceutical formulations. Wetting agents, coloring agents, release agents, coating agents, sweetening agents, flavoring agents, perfuming agents, preservative and antioxidants can also be present in the formulation. The terms such as “excipient”, “carrier”, “pharmaceutically acceptable carrier” or the like are used interchangeably herein.

[0247] In some embodiments, the pharmaceutical composition is formulated for delivery to a subject, e.g., for gene editing. Suitable routes of administrating the pharmaceutical composition described herein include, without limitation: topical, subcutaneous, transdermal, intradermal, intralesional, intraarticular, intraperitoneal, intravesical, transmucosal, gingival, intradental, intracochlear, transtympanic, intraorgan, epidural, intrathecal, intramuscular, intravenous, intravascular, intraosseus, periocular, intratumoral, intracerebral, and intracerebroventricular administration.

[0248] In some embodiments, the pharmaceutical composition described herein is administered locally to a diseased site (e.g., tumor site). In some embodiments, the pharmaceutical composition described herein is administered to a subject by injection, by means of a catheter, by means of a suppository, or by means of an implant, the implant being of a porous, non-porous, or gelatinous material, including a membrane, such as a sialastic membrane, or a fiber.

[0249] In other embodiments, the pharmaceutical composition described herein is delivered in a controlled release system. In one embodiment, a pump may be used (see, e.g., Langer, 1990, Science 249:1527-1533; Sefton, 1989, CRC Crit. Ref. Biomed. Eng. 14:201; Buchwald et al., 1980, Surgery 88:507; Saudek et al., 1989, N. Engl. J. Med. 321:574). In another embodiment, polymeric materials can be used. (See, e.g., Medical Applications of Controlled Release (Langer and Wise eds., CRC Press, Boca Raton, Fla., 1974); Controlled Drug Bioavailability, Drug Product Design and Performance (Smolen and Ball eds., Wiley, New York, 1984); Ranger and Peppas, 1983, Macromol. Sci. Rev. Macromol. Chem. 23:61. See also Levy et al., 1985, Science 228:190; During et al., 1989, Ann. Neurol. 25:351; Howard et al., 1989, J. Neurosurg. 71:105.) Other controlled release systems are discussed, for example, in Langer, supra.

[0250] In some embodiments, the pharmaceutical composition is formulated in accordance with routine procedures as a composition adapted for intravenous or subcutaneous administration to a subject, e.g., a human. In some embodiments, pharmaceutical composition for administration by injection are solutions in sterile isotonic aqueous buffer. Where necessary, the pharmaceutical can also include a solubilizing agent and a local anesthetic such as lignocaine to ease pain at the site of the injection. Generally, the ingredients are supplied either separately or mixed together in unit dosage form, for example, as a dry lyophilized powder or water free concentrate in a hermetically sealed container such as an ampoule or sachette indicating the quantity of active agent. Where the pharmaceutical is to be administered by infusion, it can be dispensed with an infusion bottle containing sterile pharmaceutical grade water or saline. Where the pharmaceutical composition is administered by injection, an ampoule of sterile water for injection or saline can be provided so that the ingredients can be mixed prior to administration.

[0251] A pharmaceutical composition for systemic administration may be a liquid, e.g., sterile saline, lactated Ringer's or Hank's solution. In addition, the pharmaceutical composition can be in solid forms and re-dissolved or suspended immediately prior to use. Lyophilized forms are also contemplated.

[0252] The pharmaceutical composition can be contained within a lipid particle or vesicle, such as a liposome or microcrystal, which is also suitable for parenteral administration. The particles can be of any suitable structure, such as unilamellar or plurilamellar, so long as compositions are contained therein. Compounds can be entrapped in “stabilized plasmid-lipid particles” (SPLP) containing the fusogenic lipid dioleoylphosphatidylethanolamine (DOPE), low levels (5-10 mol %) of cationic lipid, and stabilized by a polyethyleneglycol (PEG) coating (Zhang Y. P. et al., Gene Ther. 1999, 6:1438-47). Positively charged lipids such as N-[l-(2,3-dioleoyloxi)propyl]-N,N,N-trimethyl-amoniummethylsulfate, or “DOTAP,” are particularly preferred for such particles and vesicles. The preparation of such lipid particles is well known. See, e.g., U.S. Pat. Nos. 4,880,635; 4,906,477; 4,911,928; 4,917,951; 4,920,016; and 4,921,757; each of which is incorporated herein by reference.

[0253] The pharmaceutical composition described herein may be administered or packaged as a unit dose, for example. The term “unit dose” when used in reference to a pharmaceutical composition of the present disclosure refers to physically discrete units suitable as unitary dosage for the subject, each unit containing a predetermined quantity of active material calculated to produce the desired therapeutic effect in association with the required diluent; i.e., carrier, or vehicle.

[0254] Further, the pharmaceutical composition can be provided as a pharmaceutical kit comprising (a) a container containing a compound of the invention in lyophilized form and (b) a second container containing a pharmaceutically acceptable diluent (e.g., sterile water) for injection. The pharmaceutically acceptable diluent can be used for reconstitution or dilution of the lyophilized compound of the invention. Optionally associated with such container(s) can be a notice in the form prescribed by a governmental agency regulating the manufacture, use or sale of pharmaceuticals or biological products, which notice reflects approval by the agency of manufacture, use or sale for human administration.

[0255] In another aspect, an article of manufacture containing materials useful for the treatment of the diseases described above is included. In some embodiments, the article of manufacture comprises a container and a label. Suitable containers include, for example, bottles, vials, syringes, and test tubes. The containers may be formed from a variety of materials such as glass or plastic. In some embodiments, the container holds a composition that is effective for treating a disease described herein and may have a sterile access port. For example, the container may be an intravenous solution bag or a vial having a stopper pierceable by a hypodermic injection needle. The active agent in the composition is a compound of the invention. In some embodiments, the label on or associated with the container indicates that the composition is used for treating the disease of choice. The article of manufacture may further comprise a second container comprising a pharmaceutically-acceptable buffer, such as phosphate-buffered saline, Ringer's solution, or dextrose solution. It may further include other materials desirable from a commercial and user standpoint, including other buffers, diluents, filters, needles, syringes, and package inserts with instructions for use.

AAV Delivery of Base Editors and gRNAs

[0256] Some aspects of the invention relate to the delivery of base editors (and their associated gRNAs) using a split-base editor dual AAV strategy. One impediment to the delivery of base editors in animals has been an inability to package base editors in adeno-associated virus (AAV), an efficient and widely used delivery agent that remains the only FDA-approved in vivo gene therapy vector. The large size of the DNA encoding base editors (5.2 kb for base editors containing S. pyogenes Cas9, not including any guide RNA or regulatory sequences) can preclude packaging in AAV, which has a genome packaging size limit of ≤5 kb12.

[0257] To bypass this packaging size limit and deliver base editors using AAVs, a split-base editor dual AAV strategy was devised, in which the adenine base editor (ABE) is divided into an N-terminal and C-terminal half. This strategy is described in U.S. Provisional Patent Application Ser. No. 62/850,523, filed on May 20, 2019; the entire contents of which are hereby incorporated by reference. Each base editor half is fused to half of a fast-splicing split-intein. Following co-infection by AAV particles expressing each base editor-split intein half, protein splicing in trans reconstitutes full-length base editor. Unlike other approaches utilizing small molecules or sgRNA to bridge split Cas9, intein splicing removes all exogenous sequences and regenerates a native peptide bond at the split site, resulting in a single reconstituted protein identical in sequence to the unmodified base editor.

[0258] Split-intein ABEs were developed and integrated into optimized dual AAV genomes to enable efficient base editing in somatic tissues of therapeutic relevance, including liver, heart, muscle, retina, and brain. The resulting AAVs were used to achieve base editing efficiencies at test loci for ABEs as well as cytosine base editors (CBEs) that, in each of these tissues, meets or exceeds therapeutically relevant editing thresholds for the treatment of some human genetic diseases at AAV dosages that are known to be well-tolerated in humans. Integrating these developments, dual AAV split-intein base editors were used to treat a mouse model of Niemann-Pick disease type C, a debilitating disease that affects the central nervous system (CNS), resulting in correction of the casual mutation in CNS tissue, and an increase in animal lifespan.

[0259] Described in U.S. Provisional Patent Application Ser. No. 62/850,523, filed on May 20, 2019 are nucleic acid molecules, compositions, recombinant AAV (rAAV) particles, kits, and methods for delivering a Cas9 protein or a nucleobase editor to cells, e.g., via rAAV vectors. Typically, a Cas9 protein or a nucleobase editor is “split” into an N-terminal portion and a C-terminal portion. The N-terminal portion or C-terminal portion of a Cas9 protein or a nucleobase editor may be fused to one member of the intein system, respectively. The resulting fusion proteins, when delivered on separate vectors (e.g., separate rAAV vectors) into one cell and co-expressed, may be joined to form a complete and functional Cas9 protein or nucleobase editor (e.g., via intein-mediated protein splicing). Further provided herein are empirical testing of regulatory elements in the delivery vectors for high expression levels of the split Cas9 protein or the nucleobase editor.

[0260] In some embodiments, the adenine base editor (ABE) is split within the Cas9 domain of the ABE. In some embodiments, the ABE is split between the Glu 572 and the Cys 573 residue of a Cas9 having the sequence:

(SEQ ID NO: 73)
DKKYSIGLAIGTNSVGWAVITDEYKVPSKKFKVLGNTDRHSIKKNLIGA
LLFDSGETAEATRLKRTARRRYTRRKNRICYLQEIFSNEMAKVDDSFFH
RLEESFLVEEDKKHERHPIFGNIVDEVAYHEKYPTIYHLRKKLVDSTDK
ADLRLIYLALAHMIKFRGHFLIEGDLNPDNSDVDKLFIQLVQTYNQLFE
ENPINASGVDAKAILSARLSKSRRLENLIAQLPGEKKNGLFGNLIALSL
GLTPNFKSNFDLAEDAKLQLSKDTYDDDLDNLLAQIGDQYADLFLAAKN
LSDAILLSDILRVNTEITKAPLSASMIKRYDEHHQDLTLLKALVRQQLP
EKYKEIFFDQSKNGYAGYIDGGASQEEFYKFIKPILEKMDGTEELLVKL
NREDLLRKQRTFDNGSIPHQIHLGELHAILRRQEDFYPFLKDNREKIEK
ILTFRIPYYVGPLARGNSRFAWMTRKSEETITPWNFEEVVDKGASAQSF
IERMTNFDKNLPNEKVLPKHSLLYEYFTVYNELTKVKYVTEGMRKPAFL
SGEQKKAIVDLLFKTNRKVTVKQLKEDYFKKIECFDSVEISGVEDRFNA
SLGTYHDLLKIIKDKDFLDNEENEDILEDIVLTLTLFEDREMIEERLKT
YAHLFDDKVMKQLKRRRYTGWGRLSRKLINGIRDKQSGKTILDFLKSDG
FANRNFMQLIHDDSLTFKEDIQKAQVSGQGDSLHEHIANLAGSPAIKKG
ILQTVKVVDELVKVMGRHKPENIVIEMARENQTTQKGQKNSRERMKRIE
EGIKELGSQILKEHPVENTQLQNEKLYLYYLQNGRDMYVDQELDINRLS
DYDVDHIVPQSFLKDDSIDNKVLTRSDKNRGKSDNVPSEEVVKKMKNYW
RQLLNAKLITQRKFDNLTKAERGGLSELDKAGFIKRQLVETRQITKHVA
QILDSRMNTKYDENDKLIREVKVITLKSKLVSDFRKDFQFYKVREINNY
HHAHDAYLNAVVGTALIKKYPKLESEFVYGDYKVYDVRKMIAKSEQEIG
KATAKYFFYSNIMNFFKTEITLANGEIRKRPLIETNGETGEIVWDKGRD
FATVRKVLSMPQVNIVKKTEVQTGGFSKESILPKRNSDKLIARKKDWDP
KKYGGFVSPTVAYSVLVVAKVEKGKSKKLKSVKELLGITIMERSSFEKN
PIDFLEAKGYKEVKKDLIIKLPKYSLFELENGRKRMLASARELQKGNEL
ALPSKYVNFLYLASHYEKLKGSPEDNEQKQLFVEQHKHYLDEIIEQISE
FSKRVILADANLDKVLSAYNKHRDKPIREQAENIIHLFTLTNLGAPAAF
KYFDTTIDRKQYRSTKEVLDATLIHQSITGLYETRIDLSQLGGD

[0261] For the purpose of clarity, residues E572 and C573 are indicated in bold and underlined in the above sequence of SEQ ID NO: 73. It should be appreciated that ABEs having different Cas9 sequences could be split at the same or a different residue (e.g., a residue that is at least 1, 2, 3, 4, 5, 6, 7, 8, 9, 10, 15, 20, 25, 30, 35, 40, 45, 50, 60, 70, 80, 90, or 100 residues from the 572 or 573 residue of SEQ ID NO: 73, as exemplified herein) as compared to the Cas9 of SEQ ID NO: 73. Tools useful for identifying corresponding residues in other Cas9 sequences (e.g., BLAST) are known in the art and a skilled artisan would understand how to determine such corresponding residues. In some embodiments, the intein used to split the base editor is an Npu intein. In some embodiments, the intein comprises the amino acid sequence of SEQ ID NO: 123 or 124, wherein SEQ ID NO” 123 is an Npu DnaE N-terminal protein and wherein SEQ ID NO: 124 is an Npu DnaE C-terminal protein

Npu DnaE N-terminal Protein:
(SEQ ID NO: 123)
CLSYETEILTVEYGLLPIGKIVEKRIECTVYSVDNNGNIYTQPVAQWHD
RGEQEVFEYCLEDGSLIRATKDHKFMTVDGQMLPIDEIFERELDLMRVD
NLPN
Npu DnaE C-terminal Protein:
(SEQ ID NO: 124)
MIKIATRKYLGKQNVYDIGVERDHNFALKNGFIASN

### Kits, Vectors, Cells

[0262] Some aspects of this disclosure provide kits comprising a nucleic acid construct comprising a nucleotide sequence encoding an adenosine deaminase capable of deaminating an adenosine in a deoxyribonucleic acid (DNA) molecule. In some embodiments, the nucleotide sequence encodes any of the adenosine deaminases provided herein. In some embodiments, the nucleotide sequence comprises a heterologous promoter that drives expression of the adenosine deaminase.

[0263] Some aspects of this disclosure provide kits comprising a nucleic acid construct, comprising (a) a nucleotide sequence encoding a napDNAbp (e.g., a Cas9 domain) fused to an adenosine deaminase, or a fusion protein comprising a napDNAbp (e.g., Cas9 domain) and an adenosine deaminase as provided herein; and (b) a heterologous promoter that drives expression of the sequence of (a). In some embodiments, the kit further comprises an expression construct encoding a guide nucleic acid backbone, (e.g., a guide RNA backbone), wherein the construct comprises a cloning site positioned to allow the cloning of a nucleic acid sequence identical or complementary to a target sequence into the guide nucleic acid (e.g., guide RNA backbone).

[0264] Some aspects of this disclosure provide cells comprising any of the adenosine deaminases, fusion proteins, or complexes provided herein. In some embodiments, the cells comprise a nucleotide that encodes any of the adenosine deaminases or fusion proteins provided herein. In some embodiments, the cells comprise any of the nucleotides or vectors provided herein.

[0265] The description of exemplary embodiments of the reporter systems above is provided for illustration purposes only and not meant to be limiting. Additional reporter systems, e.g., variations of the exemplary systems described in detail above, are also embraced by this disclosure.

[0266] It should be appreciated however, that additional fusion proteins would be apparent to the skilled artisan based on the present disclosure and knowledge in the art.

[0267] The function and advantage of these and other embodiments of the present invention will be more fully understood from the Examples below. The following Examples are intended to illustrate the benefits of the present invention and to describe particular embodiments, but are not intended to exemplify the full scope of the invention. Accordingly, it will be understood that the Examples are not meant to limit the scope of the invention.

### EXAMPLES

[0268] Data provided in the below examples describe the use of adenine base editors that are capable of catalyzing hydrolytic deamination of adenosine (forming inosine, which base pairs like guanine (G)) to treat Hutchinson-Gilford progeria syndrome (HGPS) by a correcting a c.1824 cytosine (C) to thymine (T) mutation in the lamin A. Base editors comprising an adenosine deaminase (e.g., adenine base editors) have been described previously, for example, in PCT/US2017/045381 (published as WO 2018/027078); PCT/US2018/056146 (published as WO 2019/079347); PCT/2019/033848 (filed, May 23, 2019), and Gaudelli, N. M. et al. “Programmable base editing of A.T to G.C in genomic DNA without DNA cleavage.” Nature 551, 464-(2017). The first deoxyadenosine deaminases were evolved to accept DNA substrates and deaminate deoxyadenosine (dA) to deoxyinosine. As one example, evolution experiments were performed using the adenosine deaminase acting on tRNA (ADAT) from Escherichia coli (TadA, for tRNA adenosine deaminase A), to engineer adenosine deaminases that act on DNA. Briefly, ecTadA was covalently fused to a dCas9 domain, and libraries of this fusion were assembled containing mutations in the deaminase portion of the construct. Adenine base editors (ABEs) mediate the programmable conversion of A·T to G·C allows for base pair editing.

[0269] Base editing is a form of genome editing that enables the direct, irreversible conversion of one base pair to another at a target genomic locus without requiring double-stranded DNA breaks (DSBs), homology-directed repair (HDR) processes, or donor DNA templates. Compared with standard genome editing methods to introduce point mutations, base editing can proceed more efficiently, and with far fewer undesired products such as stochastic insertions or deletions (indels) or translocations.

[0270] Base editing capabilities have expanded through the development of base editors with different protospacer-adjacent motif (PAM) compatibilities, narrowed editing windows, enhanced DNA specificity, and small-molecule dependence. Fourth-generation base editors (BE4 and BE4-Gam) further improve C·G to T·A editing efficiency and product purity. Seventh-generation ABEs such as ABE7.10 convert A·T to G·C at a wide range of target genomic loci in human cells with a high efficiency, and with a very high degree of product purity (>99%), exceeding the typical performance characteristics of earlier generation base editors, e.g., BE3.

### Example 1—Base Editing to Address Progeria

[0271] Hutchinson-Gilford progeria syndrome (HGPS) is an autosomal dominant genetic disorder commonly caused by a c.1824 cytosine (C) to thymine (T) mutation in the lamin A gene, resulting in mRNA mis-splicing and stably farnesylated mutant lamin A (progerin). See, e.g., Eriksson M., et al., “Recurrent de novo point mutations in lamin A cause Hutchinson-Gilford progeria syndrome” Nature, 2003 May 15; 423(6937):293-8; the entire contents of which are hereby incorporated by reference. Progerin alters nuclear membrane structure, ultimately resulting in premature aging and early death (e.g., at approximately 13 years of age). Indel-inducing and gene therapy strategies have not been promising treatments for HGPS. Here, an approach to edit and correct an HGPS C1824T mutation in a LMNA gene using an adenosine base editor (ABE) is described. A schematic representation of mutant (C1824T) and wild-type LMNA is shown in FIG. 1, where mutant LMNA encodes the mutant protein proerin. Briefly, the C1824T mutation in the LMNA gene leads to a 50 amino acid deletion in the prelamin A protein (A607-656), thereby removing an endoproteolytic cleavage site.

[0272] FIG. 2 provides in vitro data demonstrating the use of base editors (e.g., ABEmax) to correct a C1824T point mutation in LMNA. Fibroblasts from two different HPGS patients (heterozygous for the mutant T1824 LMNA allele) were infected with lentivirus expressing ABEmax and sgRNA targeting c.1824 to generate a T to C point mutation (T1824C) in the LMNA gene. 10 days post-infection, 38% and 61% correction of LMNA c.1824 (i.e., T1824C mutation), respectively, was observed. See FIG. 2. As shown in FIG. 4, correction of the LMNA T1824C mutation was also observed 20 days post-infection.

[0273] FIG. 3 provides in vivo data demonstrating the use of base editors to correct a C1824T point mutation in LMNA. AAV-mediated in vivo somatic cell base editing of LMNA corrects the T1824 mutation, restores lamin A mRNA and protein. An optimized dual split-ABEmax AAV9 construct was used to inject homozygous human LMNA C1824T knock-in mice to determine whether the T1824 point mutation could be corrected, thereby generating wild-type LMNA mRNA and lamin A protein. An LMNA knock-in mouse has been described previously, e.g., in Varga R., et al., “Progressive vascular smooth muscle cell defects in a mouse model of Hutchinson-Gilford progeria syndrome,” PNAS Feb. 28, 2006 103(9) 3250-3255; the entire contents of which is incorporated herein by reference. A schematic representation of optimized dual split-ABE max AAV9 and the mouse injection protocol is shown in FIG. 3, panels A and B, respectively. As shown in panel C of FIG. 3, T to C correction at c.1824 in the DNA of four different tissues (heart, liver, skeletal muscle and aorta) was demonstrated. Furthermore, panel D of FIG. 3 provides data showing an increase in full length LMNA mRNA in the liver and heart of treated mice, while panel E of FIG. 3 provides data showing an increase in wild-type lamin A protein in the liver and heart of treated mice. The data demonstrate that ABEmax AAV9 is capable of correcting a C1824T mutation in mouse heart, liver, skeletal muscle, and aorta. The data also demonstrate that ABEmax AAV9 is capable of restoring Lamin A mRNA and Protein.

[0274] Data provided in FIG. 5 demonstrates that ABEmax editing substantially reduces progerin expression in patient fibroblasts. RNA sequencing data (RNAseq) demonstrates 95.5% editing in the HGADFN167 cell line after 20 days, indicating a 91% allele correction (with approximately 4% being C:T) with less than 0.1% indels. See panel A of FIG. 5. Western blots of HGADFN 167 (indicated as HGPS #167) and HGADFN 188 (indicated as HGPS #188) cell lines 20 days following treatment with ABEmax, targeting the mutant T1824 allele, indicate that editing both cell lines leads to correction at the protein level. See panel B of FIG. 5. Nearly total disappearance of progerin production in treated patient fibroblasts was observed.

[0275] A summary of experimental methods are provided below:

[0276] An optimized adenosine base editor (e.g., ABEmax) can be targeted to the LMNA C1824T mutation via recognition by a guide RNA (sgRNA) with sequence 5′-GGTCCACCCACCTGGGCTCC-3′(SEQ ID NO: 37) (5′-GGUCCACCCACCUGGGCUCC-3′ (SEQ ID NO: 36)). The A residue, indicated in bold, base pairs with the T at position 1824 of the LMNA gene to correct the point mutation.

[0277] Base editing by the ABE converts the T to A base pair at position 1824 to a C to G thereby correcting the mutation.

[0278] Base editing correction of the C1824T mutation is scarless, that is to say, it does not alter other sequences in the genome and does not result in insertions or deletions that are detectable above background levels.

[0279] ABE can be delivered in vivo by splitting it into two parts that are recombined in the cell (split-intein strategy) and packaged in an adeno-associated virus (AAV) vector.

[0280] Intraperitoneal injection of the split-intein AAV containing the ABE and the sgRNA corrects the C1824T mutation in a mouse model of HGPS and has an efficiency of >30% editing in the heart and >50% editing in the liver.

[0281] Correction of C1824T results in substantial >80% loss of mutant progerin in the liver and heart.

### Example 2—Minimal Off-Target Effects Using Base Editing to Address Progeria

[0282] Off-target effects on DNA were determined using circle-seq. Briefly, this technique involves generated circular pieces of DNA from both the HGADFN167 and HGADFN188 cell lines and treating them with a Cas9 nuclease (VRQR variant) that is used in the base editor. The cutting of these circles indicates the genomic loci to probe for off-target activity. Upon determining the top 31 off target loci, no off-target editing above background at any of the adenines within the editing windows was observed. See, FIG. 6.

[0283] Off-target effects on RNA were determined using RNAseq. As shown in FIG. 7, off-target effects on RNA are not statistically significant in ABEmax-treated fibroblasts. RNA off-target editing was determined by doing RNAseq on both the HGADFN167 and HGADFN188 cell lines after 20 days. No significant RNA A to I editing relative to untreated controls (as determined by the percent of the transcriptome in which there was a modified A to I) was observed.

### EQUIVALENTS AND SCOPE, INCORPORATION BY REFERENCE

[0284] Those skilled in the art will recognize, or be able to ascertain using no more than routine experimentation, many equivalents to the specific embodiments of the invention described herein. The scope of the present invention is not intended to be limited to the above description, but rather is as set forth in the appended claims.

[0285] In the claims articles such as “a,” “an,” and “the” may mean one or more than one unless indicated to the contrary or otherwise evident from the context. Claims or descriptions that include “or” between one or more members of a group are considered satisfied if one, more than one, or all of the group members are present in, employed in, or otherwise relevant to a given product or process unless indicated to the contrary or otherwise evident from the context. The invention includes embodiments in which exactly one member of the group is present in, employed in, or otherwise relevant to a given product or process. The invention also includes embodiments in which more than one, or all of the group members are present in, employed in, or otherwise relevant to a given product or process.

[0286] Furthermore, it is to be understood that the invention encompasses all variations, combinations, and permutations in which one or more limitations, elements, clauses, descriptive terms, etc., from one or more of the claims or from relevant portions of the description is introduced into another claim. For example, any claim that is dependent on another claim can be modified to include one or more limitations found in any other claim that is dependent on the same base claim. Furthermore, where the claims recite a composition, it is to be understood that methods of using the composition for any of the purposes disclosed herein are included, and methods of making the composition according to any of the methods of making disclosed herein or other methods known in the art are included, unless otherwise indicated or unless it would be evident to one of ordinary skill in the art that a contradiction or inconsistency would arise.

[0287] Where elements are presented as lists, e.g., in Markush group format, it is to be understood that each subgroup of the elements is also disclosed, and any element(s) can be removed from the group. It is also noted that the term “comprising” is intended to be open and permits the inclusion of additional elements or steps. It should be understood that, in general, where the invention, or aspects of the invention, is/are referred to as comprising particular elements, features, steps, etc., certain embodiments of the invention or aspects of the invention consist, or consist essentially of, such elements, features, steps, etc. For purposes of simplicity those embodiments have not been specifically set forth in haec verba herein. Thus for each embodiment of the invention that comprises one or more elements, features, steps, etc., the invention also provides embodiments that consist or consist essentially of those elements, features, steps, etc.

[0288] Where ranges are given, endpoints are included. Furthermore, it is to be understood that unless otherwise indicated or otherwise evident from the context and/or the understanding of one of ordinary skill in the art, values that are expressed as ranges can assume any specific value within the stated ranges in different embodiments of the invention, to the tenth of the unit of the lower limit of the range, unless the context clearly dictates otherwise. It is also to be understood that unless otherwise indicated or otherwise evident from the context and/or the understanding of one of ordinary skill in the art, values expressed as ranges can assume any subrange within the given range, wherein the endpoints of the subrange are expressed to the same degree of accuracy as the tenth of the unit of the lower limit of the range.

[0289] In addition, it is to be understood that any particular embodiment of the present invention may be explicitly excluded from any one or more of the claims. Where ranges are given, any value within the range may explicitly be excluded from any one or more of the claims. Any embodiment, element, feature, application, or aspect of the compositions and/or methods of the invention, can be excluded from any one or more claims. For purposes of brevity, all of the embodiments in which one or more elements, features, purposes, or aspects is excluded are not set forth explicitly herein.

[0290] All publications, patents and sequence database entries mentioned herein, including those items listed above, are hereby incorporated by reference in their entirety as if each individual publication or patent was specifically and individually indicated to be incorporated by reference. In case of conflict, the present application, including any definitions herein, will control.

1. A method for deaminating an adenosine nucleobase (A) in an LMNA gene, the method comprising contacting the LMNA gene with an adenosine base editor and a guide RNA bound to the adenosine base editor, wherein the guide RNA (gRNA) comprises a guide sequence that is complementary to a target nucleic acid sequence in the LMNA gene.

2. The method of claim 1, wherein the target nucleic acid sequence in the LMNA gene comprises:
(i) the nucleic acid sequence of any one of any one of SEQ ID NOs: 56-71;
(ii) a nucleic acid sequence absent the first 1, 2, 3, 4, 5, 6, 7, or 8 nucleic acid residues at the 5′ end of any one of SEQ ID NOs: 56-71; or
(iii) a nucleic acid sequence absent the last 1, 2, 3, 4, 5, 6, 7, or 8 nucleic acid residues at the 3′ end of any one of SEQ ID NOs: 56-71.

3. (canceled)

4. The method of claim 1, wherein the guide sequence comprises at least 10 contiguous nucleobases that are 100% complementary to the target nucleic acid sequence in the LMNA gene.

5. (canceled)

6. The method of claim 1, wherein the guide sequence of the guide RNA comprises:
(SEQ ID NO: 46)
5′-GAGAUGGGUCCACCCACCUGGGCUCC-3′
(SEQ ID NO: 47)
5′-GGAUGGGUCCACCCACCUGGGCUCC-3′
(SEQ ID NO: 48)
5′-GAUGGGUCCACCCACCUGGGCUCC-3′
(SEQ ID NO: 49)
5′-GUGGGUCCACCCACCUGGGCUCC-3′
(SEQ ID NO: 50)
5′-GGGGUCCACCCACCUGGGCUCC-3′
(SEQ ID NO: 51)
5′-GGGUCCACCCACCUGGGCUCC-3′
(SEQ ID NO: 36)
5′-GGUCCACCCACCUGGGCUCC-3′
(SEQ ID NO: 52)
5′-GUCCACCCACCUGGGCUCC-3′
(SEQ ID NO: 53)
5′-GCCACCCACCUGGGCUCC-3′
(SEQ ID NO: 54)
5′-GCACCCACCUGGGCUCC-3′
or
(SEQ ID NO: 55)
5′-GACCCACCUGGGCUCC-3′.

7-9. (canceled)

10. The method of claim 1, wherein the gRNA comprises the nucleic acid sequence:
(SEQ ID NO: 72)
5′-GGUCCACCCACCUGGGCUCCGUUUUAGAGCUAGAAAUAGCAAGUUA
AAAUAAGGCUAGUCCGUUAUCAACUUGAAAAAGUGGCACCGAGUCGGUG
CUUUUUUU-3′.

11-12. (canceled)

13. The method of claim 1, wherein the adenosine nucleobase (A) that is deaminated is the adenosine nucleobase (A) that is complementary to the T at residue position 1824 of the LMNA gene.

14. The method of claim 1, wherein deaminating the adenosine nucleobase in the LMNA gene results in a sequence that is not associated with Hutchinson-Gilford progeria syndrome (HGPS).

15. The method of claim 1, wherein deaminating the adenosine nucleobase in the LMNA gene leads to an increase in transcription of the LMNA gene.

16. The method of claim 1, wherein deaminating the adenosine nucleobase in the LMNA gene leads to an increase in LaminA protein.

17. The method of claim 1, wherein deaminating the adenosine nucleobase in the LMNA gene leads to a decrease in progerin protein.

18-19. (canceled)

20. The method of claim 1, wherein the method is performed in a subject.

21-31. (canceled)

32. The method of claim 1, wherein the adenosine base editor comprises the structure: NH₂-[first nuclear localization sequence]-[first adenosine deaminase]-[second adenosine deaminase]-[Cas9 domain]-[second nuclear localization sequence]-COOH, and each instance of “-” comprises an optional linker.

33. The method of claim 32, wherein the first nuclear localization sequence comprises the amino acid sequence KRTADGSEFESPKKKRKV (SEQ ID NO: 32), or a variant thereof that is at least 80%, identical thereto, and the second nuclear localization sequence comprises the amino acid sequence KRTADGSEFEPKKKRKV (SEQ ID NO: 33), or a variant thereof that is at least 80% identical thereto.

34. The method of claim 32, wherein the first adenosine deaminase comprises the amino acid sequence SEVEFSHEYWMRHALTLAKRAWDEREVPVGAVLVHNNRVIGEGWNRPIGRHDPTAHAEI MALRQGGLVMQNYRLIDATLYVTLEPCVMCAGAMIHSRIGRVVFGARDAKTGAAGSLMD VLHHPGMNHRVEITEGILADECAALLSDFFRMRRQEIKAQKKAQSSTD (SEQ ID NO: 10), or a variant thereof that is at least 80% identical thereto.

35. The method of claim 32, wherein the second adenosine deaminase comprises the amino acid sequence SEVEFSHEYWMRHALTLAKRARDEREVPVGAVLVLNNRVIGEGWNRAIGLHDPTAHAEIM ALRQGGLVMQNYRLIDATLYVTFEPCVMCAGAMIHSRIGRVVFGVRNAKTGAAGSLMDV LHYPGMNHRVEITEGILADECAALLCYFFRMPRQVFNAQKKAQSSTD (SEQ ID NO: 10), or a variant thereof that is at least 80% identical thereto.

36. The method of claim 32, wherein the Cas9 domain comprises the amino acid sequence DKKYSIGLAIGTNSVGWAVITDEYKVPSKKFKVLGNTDRHSIKKNLIGALLFDSGETAEATR LKRTARRRYTRRKNRICYLQEIFSNEMAKVDDSFFHRLEESFLVEEDKKHERHPIFGNIVDE VAYHEKYPTIYHLRKKLVDSTDKADLRLIYLALAHMIKFRGHFLIEGDLNPDNSDVDKLFIQ LVQTYNQLFEENPINASGVDAKAILSARLSKSRRLENLIAQLPGEKKNGLFGNLIALSLGLTP NFKSNFDLAEDAKLQLSKDTYDDDLDNLLAQIGDQYADLFLAAKNLSDAILLSDILRVNTEI TKAPLSASMIKRYDEHHQDLTLLKALVRQQLPEKYKEIFFDQSKNGYAGYIDGGASQEEFY KFIKPILEKMDGTEELLVKLNREDLLRKQRTFDNGSIPHQIHLGELHAILRRQEDFYPFLKDN REKIEKILTFRIPYYVGPLARGNSRFAWMTRKSEETITPWNFEEVVDKGASAQSFIERMTNF DKNLPNEKVLPKHSLLYEYFTVYNELTKVKYVTEGMRKPAFLSGEQKKAIVDLLFKTNRK VTVKQLKEDYFKKIECFDSVEISGVEDRFNASLGTYHDLLKIIKDKDFLDNEENEDILEDIVL TLTLFEDREMIEERLKTYAHLFDDKVMKQLKRRRYTGWGRLSRKLINGIRDKQSGKTILDF LKSDGFANRNFMQLIHDDSLTFKEDIQKAQVSGQGDSLHEHIANLAGSPAIKKGILQTVKV VDELVKVMGRHKPENIVIEMARENQTTQKGQKNSRERMKRIEEGIKELGSQILKEHPVENT QLQNEKLYLYYLQNGRDMYVDQELDINRLSDYDVDHIVPQSFLKDDSIDNKVLTRSDKNR GKSDNVPSEEVVKKMKNYWRQLLNAKLITQRKFDNLTKAERGGLSELDKAGFIKRQLVET RQITKHVAQILDSRMNTKYDENDKLIREVKVITLKSKLVSDFRKDFQFYKVREINNYHHAH DAYLNAVVGTALIKKYPKLESEFVYGDYKVYDVRKMIAKSEQEIGKATAKYFFYSNIMNF FKTEITLANGEIRKRPLIETNGETGEIVWDKGRDFATVRKVLSMPQVNIVKKTEVQTGGFSK ESILPKRNSDKLIARKKDWDPKKYGGFVSPTVAYSVLVVAKVEKGKSKKLKSVKELLGITI MERSSFEKNPIDFLEAKGYKEVKKDLIIKLPKYSLFELENGRKRMLASARELQKGNELALPS KYVNFLYLASHYEKLKGSPEDNEQKQLFVEQHKHYLDEIIEQISEFSKRVILADANLDKVLS AYNKHRDKPIREQAENIIHLFTLTNLGAPAAFKYFDTTIDRKQYRSTKEVLDATLIHQSITGL YETRIDLSQLGGD (SEQ ID NO: 73), or a variant thereof that is at least 80% identical thereto.

37. The method of claim 32, wherein the adenosine base editor comprises the amino acid sequence MKRTADGSEFESPKKKRKVSEVEFSHEYWMRHALTLAKRAWDEREVPVGAVLVHNNRVI GEGWNRPIGRHDPTAHAEIMALRQGGLVMQNYRLIDATLYVTLEPCVMCAGAMIHSRIGR VVFGARDAKTGAAGSLMDVLHHPGMNHRVEITEGILADECAALLSDFFRMRRQEIKAQKK AQSSTDSGGSSGGSSGSETPGTSESATPESSGGSSGGSSEVEFSHEYWMRHALTLAKRARDE REVPVGAVLVLNNRVIGEGWNRAIGLHDPTAHAEIMALRQGGLVMQNYRLIDATLYVTFE PCVMCAGAMIHSRIGRVVFGVRNAKTGAAGSLMDVLHYPGMNHRVEITEGILADECAALL CYFFRMPRQVFNAQKKAQSSTDSGGSSGGSSGSETPGTSESATPESSGGSSGGSDKKYSIGL AIGTNSVGWAVITDEYKVPSKKFKVLGNTDRHSIKKNLIGALLFDSGETAEATRLKRTARR RYTRRKNRICYLQEIFSNEMAKVDDSFFHRLEESFLVEEDKKHERHPIFGNIVDEVAYHEKY PTIYHLRKKLVDSTDKADLRLIYLALAHMIKFRGHFLIEGDLNPDNSDVDKLFIQLVQTYNQ LFEENPINASGVDAKAILSARLSKSRRLENLIAQLPGEKKNGLFGNLIALSLGLTPNFKSNFD LAEDAKLQLSKDTYDDDLDNLLAQIGDQYADLFLAAKNLSDAILLSDILRVNTEITKAPLSA SMIKRYDEHHQDLTLLKALVRQQLPEKYKEIFFDQSKNGYAGYIDGGASQEEFYKFIKPILE KMDGTEELLVKLNREDLLRKQRTFDNGSIPHQIHLGELHAILRRQEDFYPFLKDNREKIEKI LTFRIPYYVGPLARGNSRFAWMTRKSEETITPWNFEEVVDKGASAQSFIERMTNFDKNLPN EKVLPKHSLLYEYFTVYNELTKVKYVTEGMRKPAFLSGEQKKAIVDLLFKTNRKVTVKQL KEDYFKKIECFDSVEISGVEDRFNASLGTYHDLLKIIKDKDFLDNEENEDILEDIVLTLTLFED REMIEERLKTYAHLFDDKVMKQLKRRRYTGWGRLSRKLINGIRDKQSGKTILDFLKSDGFA NRNFMQLIHDDSLTFKEDIQKAQVSGQGDSLHEHIANLAGSPAIKKGILQTVKVVDELVKV MGRHKPENIVIEMARENQTTQKGQKNSRERMKRIEEGIKELGSQILKEHPVENTQLQNEKL YLYYLQNGRDMYVDQELDINRLSDYDVDHIVPQSFLKDDSIDNKVLTRSDKNRGKSDNVP SEEVVKKMKNYWRQLLNAKLITQRKFDNLTKAERGGLSELDKAGFIKRQLVETRQITKHV AQILDSRMNTKYDENDKLIREVKVITLKSKLVSDFRKDFQFYKVREINNYHHAHDAYLNA VVGTALIKKYPKLESEFVYGDYKVYDVRKMIAKSEQEIGKATAKYFFYSNIMNFFKTEITL ANGEIRKRPLIETNGETGEIVWDKGRDFATVRKVLSMPQVNIVKKTEVQTGGFSKESILPKR NSDKLIARKKDWDPKKYGGFVSPTVAYSVLVVAKVEKGKSKKLKSVKELLGITIMERSSFE KNPIDFLEAKGYKEVKKDLIIKLPKYSLFELENGRKRMLASARELQKGNELALPSKYVNFL YLASHYEKLKGSPEDNEQKQLFVEQHKHYLDEIIEQISEFSKRVILADANLDKVLSAYNKHR DKPIREQAENIIHLFTLTNLGAPAAFKYFDTTIDRKQYRSTKEVLDATLIHQSITGLYETRIDL SQLGGDSGGSKRTADGSEFEPKKKRKV (SEQ ID NO: 122), or a variant thereof that is at least 80% identical thereto.

38. The method of claim 1, wherein the method is a method for treating a subject having or suspected of having Hutchinson-Gilford progeria syndrome (HGPS).

39. A guide RNA comprising a guide sequence, wherein the guide sequence of the guide RNA comprises:
(SEQ ID NO: 46)
5′-GAGAUGGGUCCACCCACCUGGGCUCC-3′
(SEQ ID NO: 47)
5′-GGAUGGGUCCACCCACCUGGGCUCC-3′
(SEQ ID NO: 48)
5′-GAUGGGUCCACCCACCUGGGCUCC-3′
(SEQ ID NO: 49)
5′-GUGGGUCCACCCACCUGGGCUCC-3′
(SEQ ID NO: 50)
5′-GGGGUCCACCCACCUGGGCUCC-3′
(SEQ ID NO: 51)
5′-GGGUCCACCCACCUGGGCUCC-3′
(SEQ ID NO: 36)
5′-GGUCCACCCACCUGGGCUCC-3′
(SEQ ID NO: 52)
5′-GUCCACCCACCUGGGCUCC-3′
(SEQ ID NO: 53)
5′-GCCACCCACCUGGGCUCC-3′
(SEQ ID NO: 54)
5′-GCACCCACCUGGGCUCC-3′
or
(SEQ ID NO: 55)
5′-GACCCACCUGGGCUCC-3′.

40-51. (canceled)

52. A complex comprising (i) a base editor, and (ii) a guide RNA, wherein the guide RNA comprises a guide sequence comprising the nucleic acid sequence:
(SEQ ID NO: 46)
5′-GAGAUGGGUCCACCCACCUGGGCUCC-3′
(SEQ ID NO: 47)
5′-GGAUGGGUCCACCCACCUGGGCUCC-3′
(SEQ ID NO: 48)
5′-GAUGGGUCCACCCACCUGGGCUCC-3′
(SEQ ID NO: 49)
5′-GUGGGUCCACCCACCUGGGCUCC-3′
(SEQ ID NO: 50)
5′-GGGGUCCACCCACCUGGGCUCC-3′
(SEQ ID NO: 51)
5′-GGGUCCACCCACCUGGGCUCC-3′
(SEQ ID NO: 36)
5′-GGUCCACCCACCUGGGCUCC-3′
(SEQ ID NO: 52)
5′-GUCCACCCACCUGGGCUCC-3′
(SEQ ID NO: 53)
5′-GCCACCCACCUGGGCUCC-3′
(SEQ ID NO: 54)
5′-GCACCCACCUGGGCUCC-3′
or
(SEQ ID NO: 55)
5′-GACCCACCUGGGCUCC-3′.

53-59. (canceled)

60. A pharmaceutical composition comprising the complex of claim 52.

61-67. (canceled)

68. A virus comprising one or more nucleic acids encoding
(i) a base editor, and (ii) the guide RNA of claim 39.

69-94. (canceled)

The application's sequence listing, which the Patent Office published only in electronic form, follows.

SEQUENCE LISTING (124 sequences)

SEQ ID NO: 1 - protein, 167 aa, Escherichia coli
MSEVEFSHEYWMRHALTLAKRAWDEREVPVGAVLVHNNRVIGEGWNRPIGRHDPTAHAEIMALRQGGLVMQNYRLIDATLYVTLEPCVMCAGAMIHSRIGRVVFGARDAKTGAAGSLMDVLHHPGMNHRVEITEGILADECAALLSDFFRMRRQEIKAQKKAQSSTD

SEQ ID NO: 2 - protein, 178 aa, Escherichia coli
MRRAFITGVFFLSEVEFSHEYWMRHALTLAKRAWDEREVPVGAVLVHNNRVIGEGWNRPIGRHDPTAHAEIMALRQGGLVMQNYRLIDATLYVTLEPCVMCAGAMIHSRIGRVVFGARDAKTGAAGSLMDVLHHPGMNHRVEITEGILADECAALLSDFFRMRRQEIKAQKKAQSSTD

SEQ ID NO: 3 - protein, 160 aa, Staphylococcus aureus
MGSHMTNDIYFMTLAIEEAKKAAQLGEVPIGAIITKDDEVIARAHNLRETLQQPTAHAEHIAIERAAKVLGSWRLEGCTLYVTLEPCVMCAGTIVMSRIPRVVYGADDPKGGCSGSLMNLLQQSNFNHRAIVDKGVLKEACSTLLTTFFKNLRANKKSTN

SEQ ID NO: 4 - protein, 161 aa, Bacillus subtilis
MTQDELYMKEAIKEAKKAEEKGEVPIGAVLVINGEIIARAHNLRETEQRSIAHAEMLVIDEACKALGTWRLEGATLYVTLEPCPMCAGAVVLSRVEKVVFGAFDPKGGCSGTLMNLLQEERFNHQAEVVSGVLEEECGGMLSAFFRELRKKKKAARKNLSE

SEQ ID NO: 5 - protein, 183 aa, Salmonella typhimurium
MPPAFITGVTSLSDVELDHEYWMRHALTLAKRAWDEREVPVGAVLVHNHRVIGEGWNRPIGRHDPTAHAEIMALRQGGLVLQNYRLLDTTLYVTLEPCVMCAGAMVHSRIGRVVFGARDAKTGAAGSLIDVLHHPGMNHRVEIIEGVLRDECATLLSDFFRMRRQEIKALKKADRAEGAGPAV

SEQ ID NO: 6 - protein, 164 aa, Shewanella putrefaciens
MDEYWMQVAMQMAEKAEAAGEVPVGAVLVKDGQQIATGYNLSISQHDPTAHAEILCLRSAGKKLENYRLLDATLYITLEPCAMCAGAMVHSRIARVVYGARDEKTGAAGTVVNLLQHPAFNHQVEVTSGVLAEACSAQLSRFFKRRRDEKKALKLAQRAQQGIE

SEQ ID NO: 7 - protein, 173 aa, Haemophilus influenzae
MDAAKVRSEFDEKMMRYALELADKAEALGEIPVGAVLVDDARNIIGEGWNLSIVQSDPTAHAEIIALRNGAKNIQNYRLLNSTLYVTLEPCTMCAGAILHSRIKRLVFGASDYKTGAIGSRFHFFDDYKMNHTLEITSGVLAEECSQKLSTFFQKRREEKKIEKALLKSLSDK

SEQ ID NO: 8 - protein, 161 aa, Caulobacter crescentus
MRTDESEDQDHRMMRLALDAARAAAEAGETPVGAVILDPSTGEVIATAGNGPIAAHDPTAHAEIAAMRAAAAKLGNYRLTDLTLVVTLEPCAMCAGAISHARIGRVVFGADDPKGGAVVHGPKFFAQPTCHWRPEVTGGVLADESADLLRGFFRARRKAKI

SEQ ID NO: 9 - protein, 179 aa, Geobacter sulfurreducens
MSSLKKTPIRDDAYWMGKAIREAAKAAARDEVPIGAVIVRDGAVIGRGHNLREGSNDPSAHAEMIAIRQAARRSANWRLTGATLYVTLEPCLMCMGAIILARLERVVFGCYDPKGGAAGSLYDLSADPRLNHQVRLSPGVCQEECGTMLSDFFRDLRRRKKAKATPALFIDERKVPPEP

SEQ ID NO: 10 - protein, 166 aa, Artificial Sequence
  Synthetic polypeptide
SEVEFSHEYWMRHALTLAKRARDEREVPVGAVLVLNNRVIGEGWNRAIGLHDPTAHAEIMALRQGGLVMQNYRLIDATLYVTFEPCVMCAGAMIHSRIGRVVFGVRNAKTGAAGSLMDVLHYPGMNHRVEITEGILADECAALLCYFFRMPRQVFNAQKKAQSSTD

SEQ ID NO: 11 - protein, 1367 aa, Artificial Sequence
  Synthetic polypeptide
DKKYSIGLAIGTNSVGWAVITDEYKVPSKKFKVLGNTDRHSIKKNLIGALLFDSGETAEATRLKRTARRRYTRRKNRICYLQEIFSNEMAKVDDSFFHRLEESFLVEEDKKHERHPIFGNIVDEVAYHEKYPTIYHLRKKLVDSTDKADLRLIYLALAHMIKFRGHFLIEGDLNPDNSDVDKLFIQLVQTYNQLFEENPINASGVDAKAILSARLSKSRRLENLIAQLPGEKKNGLFGNLIALSLGLTPNFKSNFDLAEDAKLQLSKDTYDDDLDNLLAQIGDQYADLFLAAKNLSDAILLSDILRVNTEITKAPLSASMIKRYDEHHQDLTLLKALVRQQLPEKYKEIFFDQSKNGYAGYIDGGASQEEFYKFIKPILEKMDGTEELLVKLNREDLLRKQRTFDNGSIPHQIHLGELHAILRRQEDFYPFLKDNREKIEKILTFRIPYYVGPLARGNSRFAWMTRKSEETITPWNFEEVVDKGASAQSFIERMTNFDKNLPNEKVLPKHSLLYEYFTVYNELTKVKYVTEGMRKPAFLSGEQKKAIVDLLFKTNRKVTVKQLKEDYFKKIECFDSVEISGVEDRFNASLGTYHDLLKIIKDKDFLDNEENEDILEDIVLTLTLFEDREMIEERLKTYAHLFDDKVMKQLKRRRYTGWGRLSRKLINGIRDKQSGKTILDFLKSDGFANRNFMQLIHDDSLTFKEDIQKAQVSGQGDSLHEHIANLAGSPAIKKGILQTVKVVDELVKVMGRHKPENIVIEMARENQTTQKGQKNSRERMKRIEEGIKELGSQILKEHPVENTQLQNEKLYLYYLQNGRDMYVDQELDINRLSDYDVDAIVPQSFLKDDSIDNKVLTRSDKNRGKSDNVPSEEVVKKMKNYWRQLLNAKLITQRKFDNLTKAERGGLSELDKAGFIKRQLVETRQITKHVAQILDSRMNTKYDENDKLIREVKVITLKSKLVSDFRKDFQFYKVREINNYHHAHDAYLNAVVGTALIKKYPKLESEFVYGDYKVYDVRKMIAKSEQEIGKATAKYFFYSNIMNFFKTEITLANGEIRKRPLIETNGETGEIVWDKGRDFATVRKVLSMPQVNIVKKTEVQTGGFSKESILPKRNSDKLIARKKDWDPKKYGGFDSPTVAYSVLVVAKVEKGKSKKLKSVKELLGITIMERSSFEKNPIDFLEAKGYKEVKKDLIIKLPKYSLFELENGRKRMLASAGELQKGNELALPSKYVNFLYLASHYEKLKGSPEDNEQKQLFVEQHKHYLDEIIEQISEFSKRVILADANLDKVLSAYNKHRDKPIREQAENIIHLFTLTNLGAPAAFKYFDTTIDRKRYTSTKEVLDATLIHQSITGLYETRIDLSQLGGD

SEQ ID NO: 12 - protein, 1367 aa, Artificial Sequence
  Synthetic polypeptide
DKKYSIGLAIGTNSVGWAVITDEYKVPSKKFKVLGNTDRHSIKKNLIGALLFDSGETAEATRLKRTARRRYTRRKNRICYLQEIFSNEMAKVDDSFFHRLEESFLVEEDKKHERHPIFGNIVDEVAYHEKYPTIYHLRKKLVDSTDKADLRLIYLALAHMIKFRGHFLIEGDLNPDNSDVDKLFIQLVQTYNQLFEENPINASGVDAKAILSARLSKSRRLENLIAQLPGEKKNGLFGNLIALSLGLTPNFKSNFDLAEDAKLQLSKDTYDDDLDNLLAQIGDQYADLFLAAKNLSDAILLSDILRVNTEITKAPLSASMIKRYDEHHQDLTLLKALVRQQLPEKYKEIFFDQSKNGYAGYIDGGASQEEFYKFIKPILEKMDGTEELLVKLNREDLLRKQRTFDNGSIPHQIHLGELHAILRRQEDFYPFLKDNREKIEKILTFRIPYYVGPLARGNSRFAWMTRKSEETITPWNFEEVVDKGASAQSFIERMTNFDKNLPNEKVLPKHSLLYEYFTVYNELTKVKYVTEGMRKPAFLSGEQKKAIVDLLFKTNRKVTVKQLKEDYFKKIECFDSVEISGVEDRFNASLGTYHDLLKIIKDKDFLDNEENEDILEDIVLTLTLFEDREMIEERLKTYAHLFDDKVMKQLKRRRYTGWGRLSRKLINGIRDKQSGKTILDFLKSDGFANRNFMQLIHDDSLTFKEDIQKAQVSGQGDSLHEHIANLAGSPAIKKGILQTVKVVDELVKVMGRHKPENIVIEMARENQTTQKGQKNSRERMKRIEEGIKELGSQILKEHPVENTQLQNEKLYLYYLQNGRDMYVDQELDINRLSDYDVDHIVPQSFLKDDSIDNKVLTRSDKNRGKSDNVPSEEVVKKMKNYWRQLLNAKLITQRKFDNLTKAERGGLSELDKAGFIKRQLVETRQITKHVAQILDSRMNTKYDENDKLIREVKVITLKSKLVSDFRKDFQFYKVREINNYHHAHDAYLNAVVGTALIKKYPKLESEFVYGDYKVYDVRKMIAKSEQEIGKATAKYFFYSNIMNFFKTEITLANGEIRKRPLIETNGETGEIVWDKGRDFATVRKVLSMPQVNIVKKTEVQTGGFSKESILPKRNSDKLIARKKDWDPKKYGGFDSPTVAYSVLVVAKVEKGKSKKLKSVKELLGITIMERSSFEKNPIDFLEAKGYKEVKKDLIIKLPKYSLFELENGRKRMLASAGELQKGNELALPSKYVNFLYLASHYEKLKGSPEDNEQKQLFVEQHKHYLDEIIEQISEFSKRVILADANLDKVLSAYNKHRDKPIREQAENIIHLFTLTNLGAPAAFKYFDTTIDRKRYTSTKEVLDATLIHQSITGLYETRIDLSQLGGD

SEQ ID NO: 13 - protein, 1367 aa, Artificial Sequence
  Synthetic polypeptide
DKKYSIGLDIGTNSVGWAVITDEYKVPSKKFKVLGNTDRHSIKKNLIGALLFDSGETAEATRLKRTARRRYTRRKNRICYLQEIFSNEMAKVDDSFFHRLEESFLVEEDKKHERHPIFGNIVDEVAYHEKYPTIYHLRKKLVDSTDKADLRLIYLALAHMIKFRGHFLIEGDLNPDNSDVDKLFIQLVQTYNQLFEENPINASGVDAKAILSARLSKSRRLENLIAQLPGEKKNGLFGNLIALSLGLTPNFKSNFDLAEDAKLQLSKDTYDDDLDNLLAQIGDQYADLFLAAKNLSDAILLSDILRVNTEITKAPLSASMIKRYDEHHQDLTLLKALVRQQLPEKYKEIFFDQSKNGYAGYIDGGASQEEFYKFIKPILEKMDGTEELLVKLNREDLLRKQRTFDNGSIPHQIHLGELHAILRRQEDFYPFLKDNREKIEKILTFRIPYYVGPLARGNSRFAWMTRKSEETITPWNFEEVVDKGASAQSFIERMTNFDKNLPNEKVLPKHSLLYEYFTVYNELTKVKYVTEGMRKPAFLSGEQKKAIVDLLFKTNRKVTVKQLKEDYFKKIECFDSVEISGVEDRFNASLGTYHDLLKIIKDKDFLDNEENEDILEDIVLTLTLFEDREMIEERLKTYAHLFDDKVMKQLKRRRYTGWGRLSRKLINGIRDKQSGKTILDFLKSDGFANRNFMQLIHDDSLTFKEDIQKAQVSGQGDSLHEHIANLAGSPAIKKGILQTVKVVDELVKVMGRHKPENIVIEMARENQTTQKGQKNSRERMKRIEEGIKELGSQILKEHPVENTQLQNEKLYLYYLQNGRDMYVDQELDINRLSDYDVDHIVPQSFLKDDSIDNKVLTRSDKNRGKSDNVPSEEVVKKMKNYWRQLLNAKLITQRKFDNLTKAERGGLSELDKAGFIKRQLVETRQITKHVAQILDSRMNTKYDENDKLIREVKVITLKSKLVSDFRKDFQFYKVREINNYHHAHDAYLNAVVGTALIKKYPKLESEFVYGDYKVYDVRKMIAKSEQEIGKATAKYFFYSNIMNFFKTEITLANGEIRKRPLIETNGETGEIVWDKGRDFATVRKVLSMPQVNIVKKTEVQTGGFSKESILPKRNSDKLIARKKDWDPKKYGGFDSPTVAYSVLVVAKVEKGKSKKLKSVKELLGITIMERSSFEKNPIDFLEAKGYKEVKKDLIIKLPKYSLFELENGRKRMLASAGELQKGNELALPSKYVNFLYLASHYEKLKGSPEDNEQKQLFVEQHKHYLDEIIEQISEFSKRVILADANLDKVLSAYNKHRDKPIREQAENIIHLFTLTNLGAPAAFKYFDTTIDRKRYTSTKEVLDATLIHQSITGLYETRIDLSQLGGD

SEQ ID NO: 14 - protein, 345 aa, Sulfolobus islandicus
MEVPLYNIFGDNYIIQVATEAENSTIYNNKVEIDDEELRNVLNLAYKIAKNNEDAAAERRGKAKKKKGEEGETTTSNIILPLSGNDKNPWTETLKCYNFPTTVALSEVFKNFSQVKECEEVSAPSFVKPEFYEFGRSPGMVERTRRVKLEVEPHYLIIAAAGWVLTRLGKAKVSEGDYVGVNVFTPTRGILYSLIQNVNGIVPGIKPETAFGLWIARKVVSSVTNPNVSVVRIYTISDAVGQNPTTINGGFSIDLTKLLEKRYLLSERLEAIARNALSISSNMRERYIVLANYIYEYLTGSKRLEDLLYFANRDLIMNLNSDDGKVRDLKLISAYVNGELIRGEG

SEQ ID NO: 15 - protein, 345 aa, Sulfolobus islandicus
MEVPLYNIFGDNYIIQVATEAENSTIYNNKVEIDDEELRNVLNLAYKIAKNNEDAAAERRGKAKKKKGEEGETTTSNIILPLSGNDKNPWTETLKCYNFPTTVALSEVFKNFSQVKECEEVSAPSFVKPEFYKFGRSPGMVERTRRVKLEVEPHYLIMAAAGWVLTRLGKAKVSEGDYVGVNVFTPTRGILYSLIQNVNGIVPGIKPETAFGLWIARKVVSSVTNPNVSVVSIYTISDAVGQNPTTINGGFSIDLTKLLEKRDLLSERLEAIARNALSISSNMRERYIVLANYIYEYLTGSKRLEDLLYFANRDLIMNLNSDDGKVRDLKLISAYVNGELIRGEG

SEQ ID NO: 16 - protein, 1193 aa, Unknown
  uncultured Parcubacteria group bacterium
MSKRHPRISGVKGYRLHAQRLEYTGKSGAMRTIKYPLYSSPSGGRTVPREIVSAINDDYVGLYGLSNFDDLYNAEKRNEEKVYSVLDFWYDCVQYGAVFSYTAPGLLKNVAEVRGGSYELTKTLKGSHLYDELQIDKVIKFLNKKEISRANGSLDKLKKDIIDCFKAEYRERHKDQCNKLADDIKNAKKDAGASLGERQKKLFRDFFGISEQSENDKPSFTNPLNLTCCLLPFDTVNNNRNRGEVLFNKLKEYAQKLDKNEGSLEMWEYIGIGNSGTAFSNFLGEGFLGRLRENKITELKKAMMDITDAWRGQEQEEELEKRLRILAALTIKLREPKFDNHWGGYRSDINGKLSSWLQNYINQTVKIKEDLKGHKKDLKKAKEMINRFGESDTKEEAVVSSLLESIEKIVPDDSADDEKPDIPAIAIYRRFLSDGRLTLNRFVQREDVQEALIKERLEAEKKKKPKKRKKKSDAEDEKETIDFKELFPHLAKPLKLVPNFYGDSKRELYKKYKNAAIYTDALWKAVEKIYKSAFSSSLKNSFFDTDFDKDFFIKRLQKIFSVYRRFNTDKWKPIVKNSFAPYCDIVSLAENEVLYKPKQSRSRKSAAIDKNRVRLPSTENIAKAGIALARELSVAGFDWKDLLKKEEHEEYIDLIELHKTALALLLAVTETQLDISALDFVENGTVKDFMKTRDGNLVLEGRFLEMFSQSIVFSELRGLAGLMSRKEFITRSAIQTMNGKQAELLYIPHEFQSAKITTPKEMSRAFLDLAPAEFATSLEPESLSEKSLLKLKQMRYYPHYFGYELTRTGQGIDGGVAENALRLEKSPVKKREIKCKQYKTLGRGQNKIVLYVRSSYYQTQFLEWFLHRPKNVQTDVAVSGSFLIDEKKVKTRWNYDALTVALEPVSGSERVFVSQPFTIFPEKSAEEEGQRYLGIDIGEYGIAYTALEITGDSAKILDQNFISDPQLKTLREEVKGLKLDQRRGTFAMPSTKIARIRESLVHSLRNRIHHLALKHKAKIVYELEVSRFEEGKQKIKKVYATLKKADVYSEIDADKNLQTTVWGKLAVASEISASYTSQFCGACKKLWRAEMQVDETITTQELIGTVRVIKGGTLIDAIKDFMRPPIFDENDTPFPKYRDFCDKHHISKKMRGNSCLFICPFCRANADADIQASQTIALLRYVKEEKKVEDYFE

SEQ ID NO: 17 - protein, 1300 aa, Francisella novicida
MSIYQEFVNKYSLSKTLRFELIPQGKTLENIKARGLILDDEKRAKDYKKAKQIIDKYHQFFIEEILSSVCISEDLLQNYSDVYFKLKKSDDDNLQKDFKSAKDTIKKQISEYIKDSEKFKNLFNQNLIDAKKGQESDLILWLKQSKDNGIELFKANSDITDIDEALEIIKSFKGWTTYFKGFHENRKNVYSSNDIPTSIIYRIVDDNLPKFLENKAKYESLKDKAPEAINYEQIKKDLAEELTFDIDYKTSEVNQRVFSLDEVFEIANFNNYLNQSGITKFNTIIGGKFVNGENTKRKGINEYINLYSQQINDKTLKKYKMSVLFKQILSDTESKSFVIDKLEDDSDVVTTMQSFYEQIAAFKTVEEKSIKETLSLLFDDLKAQKLDLSKIYFKNDKSLTDLSQQVFDDYSVIGTAVLEYITQQIAPKNLDNPSKKEQELIAKKTEKAKYLSLETIKLALEEFNKHRDIDKQCRFEEILANFAAIPMIFDEIAQNKDNLAQISIKYQNQGKKDLLQASAEDDVKAIKDLLDQTNNLLHKLKIFHISQSEDKANILDKDEHFYLVFEECYFELANIVPLYNKIRNYITQKPYSDEKFKLNFENSTLANGWDKNKEPDNTAILFIKDDKYYLGVMNKKNNKIFDDKAIKENKGEGYKKIVYKLLPGANKMLPKVFFSAKSIKFYNPSEDILRIRNHSTHTKNGSPQKGYEKFEFNIEDCRKFIDFYKQSISKHPEWKDFGFRFSDTQRYNSIDEFYREVENQGYKLTFENISESYIDSVVNQGKLYLFQIYNKDFSAYSKGRPNLHTLYWKALFDERNLQDVVYKLNGEAELFYRKQSIPKKITHPAKEAIANKNKDNPKKESVFEYDLIKDKRFTEDKFFFHCPITINFKSSGANKFNDEINLLLKEKANDVHILSIDRGERHLAYYTLVDGKGNIIKQDTFNIIGNDRMKTNYHDKLAAIEKDRDSARKDWKKINNIKEMKEGYLSQVVHEIAKLVIEYNAIVVFEDLNFGFKRGRFKVEKQVYQKLEKMLIEKLNYLVFKDNEFDKTGGVLRAYQLTAPFETFKKMGKQTGIIYYVPAGFTSKICPVTGFVNQLYPKYESVSKSQEFFSKFDKICYNLDKGYFEFSFDYKNFGDKAAKGKWTIASFGSRLINFRNSDKNHNWDTREVYPTKELEKLLKDYSIEYGHGECIKAAICGESDKKFFAKLTSVLNTILQMRNSKTGTELDYLISPVADVNGNFFDSRQAPKNMPQDADANGAYHIGLKGLMLLGRIKNNQEGKKLNLVIKNEEYFEFVQNRNN

SEQ ID NO: 18 - protein, 1300 aa, Francisella novicida
MSIYQEFVNKYSLSKTLRFELIPQGKTLENIKARGLILDDEKRAKDYKKAKQIIDKYHQFFIEEILSSVCISEDLLQNYSDVYFKLKKSDDDNLQKDFKSAKDTIKKQISEYIKDSEKFKNLFNQNLIDAKKGQESDLILWLKQSKDNGIELFKANSDITDIDEALEIIKSFKGWTTYFKGFHENRKNVYSSNDIPTSIIYRIVDDNLPKFLENKAKYESLKDKAPEAINYEQIKKDLAEELTFDIDYKTSEVNQRVFSLDEVFEIANFNNYLNQSGITKFNTIIGGKFVNGENTKRKGINEYINLYSQQINDKTLKKYKMSVLFKQILSDTESKSFVIDKLEDDSDVVTTMQSFYEQIAAFKTVEEKSIKETLSLLFDDLKAQKLDLSKIYFKNDKSLTDLSQQVFDDYSVIGTAVLEYITQQIAPKNLDNPSKKEQELIAKKTEKAKYLSLETIKLALEEFNKHRDIDKQCRFEEILANFAAIPMIFDEIAQNKDNLAQISIKYQNQGKKDLLQASAEDDVKAIKDLLDQTNNLLHKLKIFHISQSEDKANILDKDEHFYLVFEECYFELANIVPLYNKIRNYITQKPYSDEKFKLNFENSTLANGWDKNKEPDNTAILFIKDDKYYLGVMNKKNNKIFDDKAIKENKGEGYKKIVYKLLPGANKMLPKVFFSAKSIKFYNPSEDILRIRNHSTHTKNGSPQKGYEKFEFNIEDCRKFIDFYKQSISKHPEWKDFGFRFSDTQRYNSIDEFYREVENQGYKLTFENISESYIDSVVNQGKLYLFQIYNKDFSAYSKGRPNLHTLYWKALFDERNLQDVVYKLNGEAELFYRKQSIPKKITHPAKEAIANKNKDNPKKESVFEYDLIKDKRFTEDKFFFHCPITINFKSSGANKFNDEINLLLKEKANDVHILSIARGERHLAYYTLVDGKGNIIKQDTFNIIGNDRMKTNYHDKLAAIEKDRDSARKDWKKINNIKEMKEGYLSQVVHEIAKLVIEYNAIVVFEDLNFGFKRGRFKVEKQVYQKLEKMLIEKLNYLVFKDNEFDKTGGVLRAYQLTAPFETFKKMGKQTGIIYYVPAGFTSKICPVTGFVNQLYPKYESVSKSQEFFSKFDKICYNLDKGYFEFSFDYKNFGDKAAKGKWTIASFGSRLINFRNSDKNHNWDTREVYPTKELEKLLKDYSIEYGHGECIKAAICGESDKKFFAKLTSVLNTILQMRNSKTGTELDYLISPVADVNGNFFDSRQAPKNMPQDADANGAYHIGLKGLMLLGRIKNNQEGKKLNLVIKNEEYFEFVQNRNN

SEQ ID NO: 19 - protein, 1300 aa, Francisella novicida
MSIYQEFVNKYSLSKTLRFELIPQGKTLENIKARGLILDDEKRAKDYKKAKQIIDKYHQFFIEEILSSVCISEDLLQNYSDVYFKLKKSDDDNLQKDFKSAKDTIKKQISEYIKDSEKFKNLFNQNLIDAKKGQESDLILWLKQSKDNGIELFKANSDITDIDEALEIIKSFKGWTTYFKGFHENRKNVYSSNDIPTSIIYRIVDDNLPKFLENKAKYESLKDKAPEAINYEQIKKDLAEELTFDIDYKTSEVNQRVFSLDEVFEIANFNNYLNQSGITKFNTIIGGKFVNGENTKRKGINEYINLYSQQINDKTLKKYKMSVLFKQILSDTESKSFVIDKLEDDSDVVTTMQSFYEQIAAFKTVEEKSIKETLSLLFDDLKAQKLDLSKIYFKNDKSLTDLSQQVFDDYSVIGTAVLEYITQQIAPKNLDNPSKKEQELIAKKTEKAKYLSLETIKLALEEFNKHRDIDKQCRFEEILANFAAIPMIFDEIAQNKDNLAQISIKYQNQGKKDLLQASAEDDVKAIKDLLDQTNNLLHKLKIFHISQSEDKANILDKDEHFYLVFEECYFELANIVPLYNKIRNYITQKPYSDEKFKLNFENSTLANGWDKNKEPDNTAILFIKDDKYYLGVMNKKNNKIFDDKAIKENKGEGYKKIVYKLLPGANKMLPKVFFSAKSIKFYNPSEDILRIRNHSTHTKNGSPQKGYEKFEFNIEDCRKFIDFYKQSISKHPEWKDFGFRFSDTQRYNSIDEFYREVENQGYKLTFENISESYIDSVVNQGKLYLFQIYNKDFSAYSKGRPNLHTLYWKALFDERNLQDVVYKLNGEAELFYRKQSIPKKITHPAKEAIANKNKDNPKKESVFEYDLIKDKRFTEDKFFFHCPITINFKSSGANKFNDEINLLLKEKANDVHILSIDRGERHLAYYTLVDGKGNIIKQDTFNIIGNDRMKTNYHDKLAAIEKDRDSARKDWKKINNIKEMKEGYLSQVVHEIAKLVIEYNAIVVFADLNFGFKRGRFKVEKQVYQKLEKMLIEKLNYLVFKDNEFDKTGGVLRAYQLTAPFETFKKMGKQTGIIYYVPAGFTSKICPVTGFVNQLYPKYESVSKSQEFFSKFDKICYNLDKGYFEFSFDYKNFGDKAAKGKWTIASFGSRLINFRNSDKNHNWDTREVYPTKELEKLLKDYSIEYGHGECIKAAICGESDKKFFAKLTSVLNTILQMRNSKTGTELDYLISPVADVNGNFFDSRQAPKNMPQDADANGAYHIGLKGLMLLGRIKNNQEGKKLNLVIKNEEYFEFVQNRNN

SEQ ID NO: 20 - protein, 1300 aa, Francisella novicida
MSIYQEFVNKYSLSKTLRFELIPQGKTLENIKARGLILDDEKRAKDYKKAKQIIDKYHQFFIEEILSSVCISEDLLQNYSDVYFKLKKSDDDNLQKDFKSAKDTIKKQISEYIKDSEKFKNLFNQNLIDAKKGQESDLILWLKQSKDNGIELFKANSDITDIDEALEIIKSFKGWTTYFKGFHENRKNVYSSNDIPTSIIYRIVDDNLPKFLENKAKYESLKDKAPEAINYEQIKKDLAEELTFDIDYKTSEVNQRVFSLDEVFEIANFNNYLNQSGITKFNTIIGGKFVNGENTKRKGINEYINLYSQQINDKTLKKYKMSVLFKQILSDTESKSFVIDKLEDDSDVVTTMQSFYEQIAAFKTVEEKSIKETLSLLFDDLKAQKLDLSKIYFKNDKSLTDLSQQVFDDYSVIGTAVLEYITQQIAPKNLDNPSKKEQELIAKKTEKAKYLSLETIKLALEEFNKHRDIDKQCRFEEILANFAAIPMIFDEIAQNKDNLAQISIKYQNQGKKDLLQASAEDDVKAIKDLLDQTNNLLHKLKIFHISQSEDKANILDKDEHFYLVFEECYFELANIVPLYNKIRNYITQKPYSDEKFKLNFENSTLANGWDKNKEPDNTAILFIKDDKYYLGVMNKKNNKIFDDKAIKENKGEGYKKIVYKLLPGANKMLPKVFFSAKSIKFYNPSEDILRIRNHSTHTKNGSPQKGYEKFEFNIEDCRKFIDFYKQSISKHPEWKDFGFRFSDTQRYNSIDEFYREVENQGYKLTFENISESYIDSVVNQGKLYLFQIYNKDFSAYSKGRPNLHTLYWKALFDERNLQDVVYKLNGEAELFYRKQSIPKKITHPAKEAIANKNKDNPKKESVFEYDLIKDKRFTEDKFFFHCPITINFKSSGANKFNDEINLLLKEKANDVHILSIDRGERHLAYYTLVDGKGNIIKQDTFNIIGNDRMKTNYHDKLAAIEKDRDSARKDWKKINNIKEMKEGYLSQVVHEIAKLVIEYNAIVVFEDLNFGFKRGRFKVEKQVYQKLEKMLIEKLNYLVFKDNEFDKTGGVLRAYQLTAPFETFKKMGKQTGIIYYVPAGFTSKICPVTGFVNQLYPKYESVSKSQEFFSKFDKICYNLDKGYFEFSFDYKNFGDKAAKGKWTIASFGSRLINFRNSDKNHNWDTREVYPTKELEKLLKDYSIEYGHGECIKAAICGESDKKFFAKLTSVLNTILQMRNSKTGTELDYLISPVADVNGNFFDSRQAPKNMPQDAAANGAYHIGLKGLMLLGRIKNNQEGKKLNLVIKNEEYFEFVQNRNN

SEQ ID NO: 21 - protein, 1300 aa, Francisella novicida
MSIYQEFVNKYSLSKTLRFELIPQGKTLENIKARGLILDDEKRAKDYKKAKQIIDKYHQFFIEEILSSVCISEDLLQNYSDVYFKLKKSDDDNLQKDFKSAKDTIKKQISEYIKDSEKFKNLFNQNLIDAKKGQESDLILWLKQSKDNGIELFKANSDITDIDEALEIIKSFKGWTTYFKGFHENRKNVYSSNDIPTSIIYRIVDDNLPKFLENKAKYESLKDKAPEAINYEQIKKDLAEELTFDIDYKTSEVNQRVFSLDEVFEIANFNNYLNQSGITKFNTIIGGKFVNGENTKRKGINEYINLYSQQINDKTLKKYKMSVLFKQILSDTESKSFVIDKLEDDSDVVTTMQSFYEQIAAFKTVEEKSIKETLSLLFDDLKAQKLDLSKIYFKNDKSLTDLSQQVFDDYSVIGTAVLEYITQQIAPKNLDNPSKKEQELIAKKTEKAKYLSLETIKLALEEFNKHRDIDKQCRFEEILANFAAIPMIFDEIAQNKDNLAQISIKYQNQGKKDLLQASAEDDVKAIKDLLDQTNNLLHKLKIFHISQSEDKANILDKDEHFYLVFEECYFELANIVPLYNKIRNYITQKPYSDEKFKLNFENSTLANGWDKNKEPDNTAILFIKDDKYYLGVMNKKNNKIFDDKAIKENKGEGYKKIVYKLLPGANKMLPKVFFSAKSIKFYNPSEDILRIRNHSTHTKNGSPQKGYEKFEFNIEDCRKFIDFYKQSISKHPEWKDFGFRFSDTQRYNSIDEFYREVENQGYKLTFENISESYIDSVVNQGKLYLFQIYNKDFSAYSKGRPNLHTLYWKALFDERNLQDVVYKLNGEAELFYRKQSIPKKITHPAKEAIANKNKDNPKKESVFEYDLIKDKRFTEDKFFFHCPITINFKSSGANKFNDEINLLLKEKANDVHILSIARGERHLAYYTLVDGKGNIIKQDTFNIIGNDRMKTNYHDKLAAIEKDRDSARKDWKKINNIKEMKEGYLSQVVHEIAKLVIEYNAIVVFADLNFGFKRGRFKVEKQVYQKLEKMLIEKLNYLVFKDNEFDKTGGVLRAYQLTAPFETFKKMGKQTGIIYYVPAGFTSKICPVTGFVNQLYPKYESVSKSQEFFSKFDKICYNLDKGYFEFSFDYKNFGDKAAKGKWTIASFGSRLINFRNSDKNHNWDTREVYPTKELEKLLKDYSIEYGHGECIKAAICGESDKKFFAKLTSVLNTILQMRNSKTGTELDYLISPVADVNGNFFDSRQAPKNMPQDADANGAYHIGLKGLMLLGRIKNNQEGKKLNLVIKNEEYFEFVQNRNN

SEQ ID NO: 22 - protein, 1300 aa, Francisella novicida
MSIYQEFVNKYSLSKTLRFELIPQGKTLENIKARGLILDDEKRAKDYKKAKQIIDKYHQFFIEEILSSVCISEDLLQNYSDVYFKLKKSDDDNLQKDFKSAKDTIKKQISEYIKDSEKFKNLFNQNLIDAKKGQESDLILWLKQSKDNGIELFKANSDITDIDEALEIIKSFKGWTTYFKGFHENRKNVYSSNDIPTSIIYRIVDDNLPKFLENKAKYESLKDKAPEAINYEQIKKDLAEELTFDIDYKTSEVNQRVFSLDEVFEIANFNNYLNQSGITKFNTIIGGKFVNGENTKRKGINEYINLYSQQINDKTLKKYKMSVLFKQILSDTESKSFVIDKLEDDSDVVTTMQSFYEQIAAFKTVEEKSIKETLSLLFDDLKAQKLDLSKIYFKNDKSLTDLSQQVFDDYSVIGTAVLEYITQQIAPKNLDNPSKKEQELIAKKTEKAKYLSLETIKLALEEFNKHRDIDKQCRFEEILANFAAIPMIFDEIAQNKDNLAQISIKYQNQGKKDLLQASAEDDVKAIKDLLDQTNNLLHKLKIFHISQSEDKANILDKDEHFYLVFEECYFELANIVPLYNKIRNYITQKPYSDEKFKLNFENSTLANGWDKNKEPDNTAILFIKDDKYYLGVMNKKNNKIFDDKAIKENKGEGYKKIVYKLLPGANKMLPKVFFSAKSIKFYNPSEDILRIRNHSTHTKNGSPQKGYEKFEFNIEDCRKFIDFYKQSISKHPEWKDFGFRFSDTQRYNSIDEFYREVENQGYKLTFENISESYIDSVVNQGKLYLFQIYNKDFSAYSKGRPNLHTLYWKALFDERNLQDVVYKLNGEAELFYRKQSIPKKITHPAKEAIANKNKDNPKKESVFEYDLIKDKRFTEDKFFFHCPITINFKSSGANKFNDEINLLLKEKANDVHILSIARGERHLAYYTLVDGKGNIIKQDTFNIIGNDRMKTNYHDKLAAIEKDRDSARKDWKKINNIKEMKEGYLSQVVHEIAKLVIEYNAIVVFEDLNFGFKRGRFKVEKQVYQKLEKMLIEKLNYLVFKDNEFDKTGGVLRAYQLTAPFETFKKMGKQTGIIYYVPAGFTSKICPVTGFVNQLYPKYESVSKSQEFFSKFDKICYNLDKGYFEFSFDYKNFGDKAAKGKWTIASFGSRLINFRNSDKNHNWDTREVYPTKELEKLLKDYSIEYGHGECIKAAICGESDKKFFAKLTSVLNTILQMRNSKTGTELDYLISPVADVNGNFFDSRQAPKNMPQDAAANGAYHIGLKGLMLLGRIKNNQEGKKLNLVIKNEEYFEFVQNRNN

SEQ ID NO: 23 - protein, 1300 aa, Francisella novicida
MSIYQEFVNKYSLSKTLRFELIPQGKTLENIKARGLILDDEKRAKDYKKAKQIIDKYHQFFIEEILSSVCISEDLLQNYSDVYFKLKKSDDDNLQKDFKSAKDTIKKQISEYIKDSEKFKNLFNQNLIDAKKGQESDLILWLKQSKDNGIELFKANSDITDIDEALEIIKSFKGWTTYFKGFHENRKNVYSSNDIPTSIIYRIVDDNLPKFLENKAKYESLKDKAPEAINYEQIKKDLAEELTFDIDYKTSEVNQRVFSLDEVFEIANFNNYLNQSGITKFNTIIGGKFVNGENTKRKGINEYINLYSQQINDKTLKKYKMSVLFKQILSDTESKSFVIDKLEDDSDVVTTMQSFYEQIAAFKTVEEKSIKETLSLLFDDLKAQKLDLSKIYFKNDKSLTDLSQQVFDDYSVIGTAVLEYITQQIAPKNLDNPSKKEQELIAKKTEKAKYLSLETIKLALEEFNKHRDIDKQCRFEEILANFAAIPMIFDEIAQNKDNLAQISIKYQNQGKKDLLQASAEDDVKAIKDLLDQTNNLLHKLKIFHISQSEDKANILDKDEHFYLVFEECYFELANIVPLYNKIRNYITQKPYSDEKFKLNFENSTLANGWDKNKEPDNTAILFIKDDKYYLGVMNKKNNKIFDDKAIKENKGEGYKKIVYKLLPGANKMLPKVFFSAKSIKFYNPSEDILRIRNHSTHTKNGSPQKGYEKFEFNIEDCRKFIDFYKQSISKHPEWKDFGFRFSDTQRYNSIDEFYREVENQGYKLTFENISESYIDSVVNQGKLYLFQIYNKDFSAYSKGRPNLHTLYWKALFDERNLQDVVYKLNGEAELFYRKQSIPKKITHPAKEAIANKNKDNPKKESVFEYDLIKDKRFTEDKFFFHCPITINFKSSGANKFNDEINLLLKEKANDVHILSIDRGERHLAYYTLVDGKGNIIKQDTFNIIGNDRMKTNYHDKLAAIEKDRDSARKDWKKINNIKEMKEGYLSQVVHEIAKLVIEYNAIVVFADLNFGFKRGRFKVEKQVYQKLEKMLIEKLNYLVFKDNEFDKTGGVLRAYQLTAPFETFKKMGKQTGIIYYVPAGFTSKICPVTGFVNQLYPKYESVSKSQEFFSKFDKICYNLDKGYFEFSFDYKNFGDKAAKGKWTIASFGSRLINFRNSDKNHNWDTREVYPTKELEKLLKDYSIEYGHGECIKAAICGESDKKFFAKLTSVLNTILQMRNSKTGTELDYLISPVADVNGNFFDSRQAPKNMPQDAAANGAYHIGLKGLMLLGRIKNNQEGKKLNLVIKNEEYFEFVQNRNN

SEQ ID NO: 24 - protein, 1300 aa, Francisella novicida
MSIYQEFVNKYSLSKTLRFELIPQGKTLENIKARGLILDDEKRAKDYKKAKQIIDKYHQFFIEEILSSVCISEDLLQNYSDVYFKLKKSDDDNLQKDFKSAKDTIKKQISEYIKDSEKFKNLFNQNLIDAKKGQESDLILWLKQSKDNGIELFKANSDITDIDEALEIIKSFKGWTTYFKGFHENRKNVYSSNDIPTSIIYRIVDDNLPKFLENKAKYESLKDKAPEAINYEQIKKDLAEELTFDIDYKTSEVNQRVFSLDEVFEIANFNNYLNQSGITKFNTIIGGKFVNGENTKRKGINEYINLYSQQINDKTLKKYKMSVLFKQILSDTESKSFVIDKLEDDSDVVTTMQSFYEQIAAFKTVEEKSIKETLSLLFDDLKAQKLDLSKIYFKNDKSLTDLSQQVFDDYSVIGTAVLEYITQQIAPKNLDNPSKKEQELIAKKTEKAKYLSLETIKLALEEFNKHRDIDKQCRFEEILANFAAIPMIFDEIAQNKDNLAQISIKYQNQGKKDLLQASAEDDVKAIKDLLDQTNNLLHKLKIFHISQSEDKANILDKDEHFYLVFEECYFELANIVPLYNKIRNYITQKPYSDEKFKLNFENSTLANGWDKNKEPDNTAILFIKDDKYYLGVMNKKNNKIFDDKAIKENKGEGYKKIVYKLLPGANKMLPKVFFSAKSIKFYNPSEDILRIRNHSTHTKNGSPQKGYEKFEFNIEDCRKFIDFYKQSISKHPEWKDFGFRFSDTQRYNSIDEFYREVENQGYKLTFENISESYIDSVVNQGKLYLFQIYNKDFSAYSKGRPNLHTLYWKALFDERNLQDVVYKLNGEAELFYRKQSIPKKITHPAKEAIANKNKDNPKKESVFEYDLIKDKRFTEDKFFFHCPITINFKSSGANKFNDEINLLLKEKANDVHILSIARGERHLAYYTLVDGKGNIIKQDTFNIIGNDRMKTNYHDKLAAIEKDRDSARKDWKKINNIKEMKEGYLSQVVHEIAKLVIEYNAIVVFADLNFGFKRGRFKVEKQVYQKLEKMLIEKLNYLVFKDNEFDKTGGVLRAYQLTAPFETFKKMGKQTGIIYYVPAGFTSKICPVTGFVNQLYPKYESVSKSQEFFSKFDKICYNLDKGYFEFSFDYKNFGDKAAKGKWTIASFGSRLINFRNSDKNHNWDTREVYPTKELEKLLKDYSIEYGHGECIKAAICGESDKKFFAKLTSVLNTILQMRNSKTGTELDYLISPVADVNGNFFDSRQAPKNMPQDAAANGAYHIGLKGLMLLGRIKNNQEGKKLNLVIKNEEYFEFVQNRNN

SEQ ID NO: 25 - protein, 887 aa, Natronobacterium gregoryi
MTVIDLDSTTTADELTSGHTYDISVTLTGVYDNTDEQHPRMSLAFEQDNGERRYITLWKNTTPKDVFTYDYATGSTYIFTNIDYEVKDGYENLTATYQTTVENATAQEVGTTDEDETFAGGEPLDHHLDDALNETPDDAETESDSGHVMTSFASRDQLPEWTLHTYTLTATDGAKTDTEYARRTLAYTVRQELYTDHDAAPVATDGLMLLTPEPLGETPLDLDCGVRVEADETRTLDYTTAKDRLLARELVEEGLKRSLWDDYLVRGIDEVLSKEPVLTCDEFDLHERYDLSVEVGHSGRAYLHINFRHRFVPKLTLADIDDDNIYPGLRVKTTYRPRRGHIVWGLRDECATDSLNTLGNQSVVAYHRNNQTPINTDLLDAIEAADRRVVETRRQGHGDDAVSFPQELLAVEPNTHQIKQFASDGFHQQARSKTRLSASRCSEKAQAFAERLDPVRLNGSTVEFSSEFFTGNNEQQLRLLYENGESVLTFRDGARGAHPDETFSKGIVNPPESFEVAVVLPEQQADTCKAQWDTMADLLNQAGAPPTRSETVQYDAFSSPESISLNVAGAIDPSEVDAAFVVLPPDQEGFADLASPTETYDELKKALANMGIYSQMAYFDRFRDAKIFYTRNVALGLLAAAGGVAFTTEHAMPGDADMFIGIDVSRSYPEDGASGQINIAATATAVYKDGTILGHSSTRPQLGEKLQSTDVRDIMKNAILGYQQVTGESPTHIVIHRDGFMNEDLDPATEFLNEQGVEYDIVEIRKQPQTRLLAVSDVQYDTPVKSIAAINQNEPRATVATFGAPEYLATRDGGGLPRPIQIERVAGETDIETLTRQVYLLSQSHIQVHNSTARLPITTAYADQASTHATKGYLVQTGAFESNVGFL

SEQ ID NO: 26 - protein, 1129 aa, Alicyclobacillus acidoterrestris
MAVKSIKVKLRLDDMPEIRAGLWKLHKEVNAGVRYYTEWLSLLRQENLYRRSPNGDGEQECDKTAEECKAELLERLRARQVENGHRGPAGSDDELLQLARQLYELLVPQAIGAKGDAQQIARKFLSPLADKDAVGGLGIAKAGNKPRWVRMREAGEPGWEEEKEKAETRKSADRTADVLRALADFGLKPLMRVYTDSEMSSVEWKPLRKGQAVRTWDRDMFQQAIERMMSWESWNQRVGQEYAKLVEQKNRFEQKNFVGQEHLVHLVNQLQQDMKEASPGLESKEQTAHYVTGRALRGSDKVFEKWGKLAPDAPFDLYDAEIKNVQRRNTRRFGSHDLFAKLAEPEYQALWREDASFLTRYAVYNSILRKLNHAKMFATFTLPDATAHPIWTRFDKLGGNLHQYTFLFNEFGERRHAIRFHKLLKVENGVAREVDDVTVPISMSEQLDNLLPRDPNEPIALYFRDYGAEQHFTGEFGGAKIQCRRDQLAHMHRRRGARDVYLNVSVRVQSQSEARGERRPPYAAVFRLVGDNHRAFVHFDKLSDYLAEHPDDGKLGSEGLLSGLRVMSVDLGLRTSASISVFRVARKDELKPNSKGRVPFFFPIKGNDNLVAVHERSQLLKLPGETESKDLRAIREERQRTLRQLRTQLAYLRLLVRCGSEDVGRRERSWAKLIEQPVDAANHMTPDWREAFENELQKLKSLHGICSDKEWMDAVYESVRRVWRHMGKQVRDWRKDVRSGERPKIRGYAKDVVGGNSIEQIEYLERQYKFLKSWSFFGKVSGQVIRAEKGSRFAITLREHIDHAKEDRLKKLADRIIMEALGYVYALDERGKGKWVAKYPPCQLILLEELSEYQFNNDRPPSENNQLMQWSHRGVFQELINQAQVHDLLVGTMYAAFSSRFDARTGAPGIRCRRVPARCTQEHNPEPFPWWLNKFVVEHTLDACPLRADDLIPTGEGEIFVSPFSAEEGDFHQIHADLNAAQNLQQRLWSDFDISQIRLRCDWGEVDGELVLIPRLTGKRTADSYSNKVFYTNTGVTYYERERGKKRRKVFAQEKLSEEEAELLVEADEAREKSVVLMRDPSGIINRGNWTRQKEFWSMVNQRIEGYLVKQIRSRVPLQDSACENTGDI

SEQ ID NO: 27 - protein, 1389 aa, Leptotrichia shahii
MGNLFGHKRWYEVRDKKDFKIKRKVKVKRNYDGNKYILNINENNNKEKIDNNKFIRKYINYKKNDNILKEFTRKFHAGNILFKLKGKEGIIRIENNDDFLETEEVVLYIEAYGKSEKLKALGITKKKIIDEAIRQGITKDDKKIEIKRQENEEEIEIDIRDEYTNKTLNDCSIILRIIENDELETKKSIYEIFKNINMSLYKIIEKIIENETEKVFENRYYEEHLREKLLKDDKIDVILTNFMEIREKIKSNLEILGFVKFYLNVGGDKKKSKNKKMLVEKILNINVDLTVEDIADFVIKELEFWNITKRIEKVKKVNNEFLEKRRNRTYIKSYVLLDKHEKFKIERENKKDKIVKFFVENIKNNSIKEKIEKILAEFKIDELIKKLEKELKKGNCDTEIFGIFKKHYKVNFDSKKFSKKSDEEKELYKIIYRYLKGRIEKILVNEQKVRLKKMEKIEIEKILNESILSEKILKRVKQYTLEHIMYLGKLRHNDIDMTTVNTDDFSRLHAKEELDLELITFFASTNMELNKIFSRENINNDENIDFFGGDREKNYVLDKKILNSKIKIIRDLDFIDNKNNITNNFIRKFTKIGTNERNRILHAISKERDLQGTQDDYNKVINIIQNLKISDEEVSKALNLDVVFKDKKNIITKINDIKISEENNNDIKYLPSFSKVLPEILNLYRNNPKNEPFDTIETEKIVLNALIYVNKELYKKLILEDDLEENESKNIFLQELKKTLGNIDEIDENIIENYYKNAQISASKGNNKAIKKYQKKVIECYIGYLRKNYEELFDFSDFKMNIQEIKKQIKDINDNKTYERITVKTSDKTIVINDDFEYIISIFALLNSNAVINKIRNRFFATSVWLNTSEYQNIIDILDEIMQLNTLRNECITENWNLNLEEFIQKMKEIEKDFDDFKIQTKKEIFNNYYEDIKNNILTEFKDDINGCDVLEKKLEKIVIFDDETKFEIDKKSNILQDEQRKLSNINKKDLKKKVDQYIKDKDQEIKSKILCRIIFNSDFLKKYKKEIDNLIEDMESENENKFQEIYYPKERKNELYIYKKNLFLNIGNPNFDKIYGLISNDIKMADAKFLFNIDGKNIRKNKISEIDAILKNLNDKLNGYSKEYKEKYIKKLKENDDFFAKNIQNKNYKSFEKDYNRVSEYKKIRDLVEFNYLNKIESYLIDINWKLAIQMARFERDMHYIVNGLRELGIIKLSGYNTGISRAYPKRNGSDGFYTTTAYYKFFDEESYKKFEKICYGFGIDLSENSEINKPENESIRNYISHFYIVRNPFADYSIAEQIDRVSNLLSYSTRYNNSTYASVFEVFKKDVNLDYDELKKKFKLIGNNDILERLMKPKKVSVLELESYNSDYIKNLIIELLTKIENTNDTL

SEQ ID NO: 28 - protein, 1052 aa, Artificial Sequence
  Synthetic polypeptide
KRNYILGLDIGITSVGYGIIDYETRDVIDAGVRLFKEANVENNEGRRSKRGARRLKRRRRHRIQRVKKLLFDYNLLTDHSELSGINPYEARVKGLSQKLSEEEFSAALLHLAKRRGVHNVNEVEEDTGNELSTKEQISRNSKALEEKYVAELQLERLKKDGEVRGSINRFKTSDYVKEAKQLLKVQKAYHQLDQSFIDTYIDLLETRRTYYEGPGEGSPFGWKDIKEWYEMLMGHCTYFPEELRSVKYAYNADLYNALNDLNNLVITRDENEKLEYYEKFQIIENVFKQKKKPTLKQIAKEILVNEEDIKGYRVTSTGKPEFTNLKVYHDIKDITARKEIIENAELLDQIAKILTIYQSSEDIQEELTNLNSELTQEEIEQISNLKGYTGTHNLSLKAINLILDELWHTNDNQIAIFNRLKLVPKKVDLSQQKEIPTTLVDDFILSPVVKRSFIQSIKVINAIIKKYGLPNDIIIELAREKNSKDAQKMINEMQKRNRQTNERIEEIIRTTGKENAKYLIEKIKLHDMQEGKCLYSLEAIPLEDLLNNPFNYEVDHIIPRSVSFDNSFNNKVLVKQEENSKKGNRTPFQYLSSSDSKISYETFKKHILNLAKGKGRISKTKKEYLLEERDINRFSVQKDFINRNLVDTRYATRGLMNLLRSYFRVNNLDVKVKSINGGFTSFLRRKWKFKKERNKGYKHHAEDALIIANADFIFKEWKKLDKAKKVMENQMFEEKQAESMPEIETEQEYKEIFITPHQIKHIKDFKDYKYSHRVDKKPNRELINDTLYSTRKDDKGNTLIVNNLNGLYDKDNDKLKKLINKSPEKLLMYHHDPQTYQKLKLIMEQYGDEKNPLYKYYEETGNYLTKYSKKDNGPVIKKIKYYGNKLNAHLDITDDYPNSRNKVVKLSLKPYRFDVYLDNGVYKFVTVKNLDVIKKENYYEVNSKCYEEAKKLKKISNQAEFIASFYNNDLIKINGELYRVIGVNNDLLNRIEVNMIDITYREYLENMNDKRPPRIIKTIASKTQSIKKYSTDILGNLYEVKSKKHPQIIKKG

SEQ ID NO: 29 - protein, 1367 aa, Artificial Sequence
  Synthetic polypeptide
DKKYSIGLAIGTNSVGWAVITDEYKVPSKKFKVLGNTDRHSIKKNLIGALLFDSGETAEATRLKRTARRRYTRRKNRICYLQEIFSNEMAKVDDSFFHRLEESFLVEEDKKHERHPIFGNIVDEVAYHEKYPTIYHLRKKLVDSTDKADLRLIYLALAHMIKFRGHFLIEGDLNPDNSDVDKLFIQLVQTYNQLFEENPINASGVDAKAILSARLSKSRRLENLIAQLPGEKKNGLFGNLIALSLGLTPNFKSNFDLAEDAKLQLSKDTYDDDLDNLLAQIGDQYADLFLAAKNLSDAILLSDILRVNTEITKAPLSASMIKRYDEHHQDLTLLKALVRQQLPEKYKEIFFDQSKNGYAGYIDGGASQEEFYKFIKPILEKMDGTEELLVKLNREDLLRKQRTFDNGSIPHQIHLGELHAILRRQEDFYPFLKDNREKIEKILTFRIPYYVGPLARGNSRFAWMTRKSEETITPWNFEEVVDKGASAQSFIERMTAFDKNLPNEKVLPKHSLLYEYFTVYNELTKVKYVTEGMRKPAFLSGEQKKAIVDLLFKTNRKVTVKQLKEDYFKKIECFDSVEISGVEDRFNASLGTYHDLLKIIKDKDFLDNEENEDILEDIVLTLTLFEDREMIEERLKTYAHLFDDKVMKQLKRRRYTGWGALSRKLINGIRDKQSGKTILDFLKSDGFANRNFMALIHDDSLTFKEDIQKAQVSGQGDSLHEHIANLAGSPAIKKGILQTVKVVDELVKVMGRHKPENIVIEMARENQTTQKGQKNSRERMKRIEEGIKELGSQILKEHPVENTQLQNEKLYLYYLQNGRDMYVDQELDINRLSDYDVDHIVPQSFLKDDSIDNKVLTRSDKNRGKSDNVPSEEVVKKMKNYWRQLLNAKLITQRKFDNLTKAERGGLSELDKAGFIKRQLVETRAITKHVAQILDSRMNTKYDENDKLIREVKVITLKSKLVSDFRKDFQFYKVREINNYHHAHDAYLNAVVGTALIKKYPKLESEFVYGDYKVYDVRKMIAKSEQEIGKATAKYFFYSNIMNFFKTEITLANGEIRKRPLIETNGETGEIVWDKGRDFATVRKVLSMPQVNIVKKTEVQTGGFSKESILPKRNSDKLIARKKDWDPKKYGGFDSPTVAYSVLVVAKVEKGKSKKLKSVKELLGITIMERSSFEKNPIDFLEAKGYKEVKKDLIIKLPKYSLFELENGRKRMLASAGELQKGNELALPSKYVNFLYLASHYEKLKGSPEDNEQKQLFVEQHKHYLDEIIEQISEFSKRVILADANLDKVLSAYNKHRDKPIREQAENIIHLFTLTNLGAPAAFKYFDTTIDRKRYTSTKEVLDATLIHQSITGLYETRIDLSQLGGD

SEQ ID NO: 30 - protein, 7 aa, Artificial Sequence
  Synthetic polypeptide
PKKKRKV

SEQ ID NO: 31 - protein, 30 aa, Artificial Sequence
  Synthetic polypeptide
MDSLLMNRRKFLYQFKNVRWAKGRRETYLC

SEQ ID NO: 32 - protein, 18 aa, Artificial Sequence
  Synthetic polypeptide
KRTADGSEFESPKKKRKV

SEQ ID NO: 33 - protein, 17 aa, Unknown
  Xenopus nucleoplasmin
KRTADGSEFEPKKKRKV

SEQ ID NO: 34 - DNA, 76 bp, Artificial Sequence
  Synthetic polynucleotide
caaggcatctgccagcggctcaggagcccaggtgggcggacccatctcctctggctcttctgcctccagtgtcacg

SEQ ID NO: 35 - DNA, 76 bp, Artificial Sequence
  Synthetic polynucleotide
caaggcatctgccagcggctcaggagcccaggtgggtggacccatctcctctggctcttctgcctccagtgtcacg

SEQ ID NO: 36 - RNA, 20 nt, Artificial Sequence
  Synthetic polynucleotide
gguccacccaccugggcucc

SEQ ID NO: 37 - DNA, 20 bp, Artificial Sequence
  Synthetic polynucleotide
ggtccacccacctgggctcc

SEQ ID NO: 38 - DNA, 125 bp, Artificial Sequence
  Synthetic polynucleotide
  misc_feature (1)..(8): n is a, c, g, or t
nnnnnnnngtttttgtactctcaagatttagaaataaatcttgcagaagctacaaagataaggcttcatgccgaaatcaacaccctgtcattttatggcagggtgttttcgttatttaatttttt

SEQ ID NO: 39 - DNA, 121 bp, Artificial Sequence
  Synthetic polynucleotide
  misc_feature (1)..(18): n is a, c, g, or t
nnnnnnnnnnnnnnnnnngtttttgtactctcagaaatgcagaagctacaaagataaggcttcatgccgaaatcaacaccctgtcattttatggcagggtgttttcgttatttaatttttt

SEQ ID NO: 40 - DNA, 109 bp, Artificial Sequence
  Synthetic polynucleotide
  misc_feature (1)..(20): n is a, c, g, or t
nnnnnnnnnnnnnnnnnnnngtttttgtactctcagaaatgcagaagctacaaagataaggcttcatgccgaaatcaacaccctgtcattttatggcagggtgtttttt

SEQ ID NO: 41 - DNA, 102 bp, Artificial Sequence
  Synthetic polynucleotide
  misc_feature (1)..(20): n is a, c, g, or t
nnnnnnnnnnnnnnnnnnnngttttagagctagaaatagcaagttaaaataaggctagtccgttatcaacttgaaaaagtggcaccgagtcggtgctttttt

SEQ ID NO: 42 - DNA, 88 bp, Artificial Sequence
  Synthetic polynucleotide
  misc_feature (1)..(20): n is a, c, g, or t
nnnnnnnnnnnnnnnnnnnngttttagagctagaaatagcaagttaaaataaggctagtccgttatcaacttgaaaaagtgttttttt

SEQ ID NO: 43 - DNA, 76 bp, Artificial Sequence
  Synthetic polynucleotide
  misc_feature (1)..(20): n is a, c, g, or t
nnnnnnnnnnnnnnnnnnnngttttagagctagaaatagcaagttaaaataaggctagtccgttatcatttttttt

SEQ ID NO: 44 - RNA, 82 nt, Artificial Sequence
  Synthetic polynucleotide
guuuuagagcuagaaauagcaaguuaaaauaaaggcuaguccguuaucaacuugaaaaaguggcaccgagucggugcuuuuu

SEQ ID NO: 45 - RNA, 83 nt, Artificial Sequence
  Synthetic polynucleotide
guuuuagagcuagaaauagcaaguuaaaauaaggcuaguccguuaucaacuugaaaaaguggcaccgagucggugcuuuuuuu

SEQ ID NO: 46 - RNA, 26 nt, Artificial Sequence
  Synthetic polynucleotide
gagauggguccacccaccugggcucc

SEQ ID NO: 47 - RNA, 25 nt, Artificial Sequence
  Synthetic polynucleotide
ggauggguccacccaccugggcucc

SEQ ID NO: 48 - RNA, 24 nt, Artificial Sequence
  Synthetic polynucleotide
gauggguccacccaccugggcucc

SEQ ID NO: 49 - RNA, 23 nt, Artificial Sequence
  Synthetic polynucleotide
guggguccacccaccugggcucc

SEQ ID NO: 50 - RNA, 22 nt, Artificial Sequence
  Synthetic polynucleotide
gggguccacccaccugggcucc

SEQ ID NO: 51 - RNA, 21 nt, Artificial Sequence
  Synthetic polynucleotide
ggguccacccaccugggcucc

SEQ ID NO: 52 - RNA, 19 nt, Artificial Sequence
  Synthetic polynucleotide
guccacccaccugggcucc

SEQ ID NO: 53 - RNA, 18 nt, Artificial Sequence
  Synthetic polynucleotide
gccacccaccugggcucc

SEQ ID NO: 54 - RNA, 17 nt, Artificial Sequence
  Synthetic polynucleotide
gcacccaccugggcucc

SEQ ID NO: 55 - RNA, 16 nt, Artificial Sequence
  Synthetic polynucleotide
gacccaccugggcucc

SEQ ID NO: 56 - DNA, 20 bp, Artificial Sequence
  Synthetic polynucleotide
ggagcccaggtgggtggacc

SEQ ID NO: 57 - DNA, 20 bp, Artificial Sequence
  Synthetic polynucleotide
ctcaggagcccaggtgggtg

SEQ ID NO: 58 - DNA, 20 bp, Artificial Sequence
  Synthetic polynucleotide
tcaggagcccaggtgggtgg

SEQ ID NO: 59 - DNA, 20 bp, Artificial Sequence
  Synthetic polynucleotide
caggagcccaggtgggtgga

SEQ ID NO: 60 - DNA, 20 bp, Artificial Sequence
  Synthetic polynucleotide
aggagcccaggtgggtggac

SEQ ID NO: 61 - DNA, 20 bp, Artificial Sequence
  Synthetic polynucleotide
gagcccaggtgggtggaccc

SEQ ID NO: 62 - DNA, 20 bp, Artificial Sequence
  Synthetic polynucleotide
agcccaggtgggtggaccca

SEQ ID NO: 63 - DNA, 20 bp, Artificial Sequence
  Synthetic polynucleotide
gcccaggtgggtggacccat

SEQ ID NO: 64 - DNA, 20 bp, Artificial Sequence
  Synthetic polynucleotide
cccaggtgggtggacccatc

SEQ ID NO: 65 - DNA, 19 bp, Artificial Sequence
  Synthetic polynucleotide
ccaggtgggtggacccatc

SEQ ID NO: 66 - DNA, 22 bp, Artificial Sequence
  Synthetic polynucleotide
aggagcccaggtgggtggaccc

SEQ ID NO: 67 - DNA, 24 bp, Artificial Sequence
  Synthetic polynucleotide
caggagcccaggtgggtggaccca

SEQ ID NO: 68 - DNA, 26 bp, Artificial Sequence
  Synthetic polynucleotide
tcaggagcccaggtgggtggacccat

SEQ ID NO: 69 - DNA, 28 bp, Artificial Sequence
  Synthetic polynucleotide
ctcaggagcccaggtgggtggacccatc

SEQ ID NO: 70 - DNA, 30 bp, Artificial Sequence
  Synthetic polynucleotide
gctcaggagcccaggtgggtggacccatct

SEQ ID NO: 71 - DNA, 32 bp, Artificial Sequence
  Synthetic polynucleotide
ggctcaggagcccaggtgggtggacccatctc

SEQ ID NO: 72 - RNA, 103 nt, Artificial Sequence
  Synthetic polynucleotide
gguccacccaccugggcuccguuuuagagcuagaaauagcaaguuaaaauaaggcuaguccguuaucaacuugaaaaaguggcaccgagucggugcuuuuuuu

SEQ ID NO: 73 - protein, 1367 aa, Artificial Sequence
  Synthetic polypeptide
DKKYSIGLAIGTNSVGWAVITDEYKVPSKKFKVLGNTDRHSIKKNLIGALLFDSGETAEATRLKRTARRRYTRRKNRICYLQEIFSNEMAKVDDSFFHRLEESFLVEEDKKHERHPIFGNIVDEVAYHEKYPTIYHLRKKLVDSTDKADLRLIYLALAHMIKFRGHFLIEGDLNPDNSDVDKLFIQLVQTYNQLFEENPINASGVDAKAILSARLSKSRRLENLIAQLPGEKKNGLFGNLIALSLGLTPNFKSNFDLAEDAKLQLSKDTYDDDLDNLLAQIGDQYADLFLAAKNLSDAILLSDILRVNTEITKAPLSASMIKRYDEHHQDLTLLKALVRQQLPEKYKEIFFDQSKNGYAGYIDGGASQEEFYKFIKPILEKMDGTEELLVKLNREDLLRKQRTFDNGSIPHQIHLGELHAILRRQEDFYPFLKDNREKIEKILTFRIPYYVGPLARGNSRFAWMTRKSEETITPWNFEEVVDKGASAQSFIERMTNFDKNLPNEKVLPKHSLLYEYFTVYNELTKVKYVTEGMRKPAFLSGEQKKAIVDLLFKTNRKVTVKQLKEDYFKKIECFDSVEISGVEDRFNASLGTYHDLLKIIKDKDFLDNEENEDILEDIVLTLTLFEDREMIEERLKTYAHLFDDKVMKQLKRRRYTGWGRLSRKLINGIRDKQSGKTILDFLKSDGFANRNFMQLIHDDSLTFKEDIQKAQVSGQGDSLHEHIANLAGSPAIKKGILQTVKVVDELVKVMGRHKPENIVIEMARENQTTQKGQKNSRERMKRIEEGIKELGSQILKEHPVENTQLQNEKLYLYYLQNGRDMYVDQELDINRLSDYDVDHIVPQSFLKDDSIDNKVLTRSDKNRGKSDNVPSEEVVKKMKNYWRQLLNAKLITQRKFDNLTKAERGGLSELDKAGFIKRQLVETRQITKHVAQILDSRMNTKYDENDKLIREVKVITLKSKLVSDFRKDFQFYKVREINNYHHAHDAYLNAVVGTALIKKYPKLESEFVYGDYKVYDVRKMIAKSEQEIGKATAKYFFYSNIMNFFKTEITLANGEIRKRPLIETNGETGEIVWDKGRDFATVRKVLSMPQVNIVKKTEVQTGGFSKESILPKRNSDKLIARKKDWDPKKYGGFVSPTVAYSVLVVAKVEKGKSKKLKSVKELLGITIMERSSFEKNPIDFLEAKGYKEVKKDLIIKLPKYSLFELENGRKRMLASARELQKGNELALPSKYVNFLYLASHYEKLKGSPEDNEQKQLFVEQHKHYLDEIIEQISEFSKRVILADANLDKVLSAYNKHRDKPIREQAENIIHLFTLTNLGAPAAFKYFDTTIDRKQYRSTKEVLDATLIHQSITGLYETRIDLSQLGGD

SEQ ID NO: 74 - protein, 16 aa, Artificial Sequence
  Synthetic polypeptide
SGSETPGTSESATPES

SEQ ID NO: 75 - protein, 32 aa, Artificial Sequence
  Synthetic polypeptide
SGGSSGGSSGSETPGTSESATPESSGGSSGGS

SEQ ID NO: 76 - protein, 120 aa, Artificial Sequence
  Synthetic polypeptide
  misc_feature (5)..(120): may be absent
SGGSSGGSSGGSSGGSSGGSSGGSSGGSSGGSSGGSSGGSSGGSSGGSSGGSSGGSSGGSSGGSSGGSSGGSSGGSSGGSSGGSSGGSSGGSSGGSSGGSSGGSSGGSSGGSSGGSSGGS

SEQ ID NO: 77 - protein, 120 aa, Artificial Sequence
  Synthetic polypeptide
  misc_feature (5)..(120): may be absent
GGGSGGGSGGGSGGGSGGGSGGGSGGGSGGGSGGGSGGGSGGGSGGGSGGGSGGGSGGGSGGGSGGGSGGGSGGGSGGGSGGGSGGGSGGGSGGGSGGGSGGGSGGGSGGGSGGGSGGGS

SEQ ID NO: 78 - protein, 150 aa, Artificial Sequence
  Synthetic polypeptide
  misc_feature (6)..(150): may be absent
GGGGSGGGGSGGGGSGGGGSGGGGSGGGGSGGGGSGGGGSGGGGSGGGGSGGGGSGGGGSGGGGSGGGGSGGGGSGGGGSGGGGSGGGGSGGGGSGGGGSGGGGSGGGGSGGGGSGGGGSGGGGSGGGGSGGGGSGGGGSGGGGSGGGGS

SEQ ID NO: 79 - protein, 150 aa, Artificial Sequence
  Synthetic polypeptide
  misc_feature (6)..(150): may be absent
EAAAKEAAAKEAAAKEAAAKEAAAKEAAAKEAAAKEAAAKEAAAKEAAAKEAAAKEAAAKEAAAKEAAAKEAAAKEAAAKEAAAKEAAAKEAAAKEAAAKEAAAKEAAAKEAAAKEAAAKEAAAKEAAAKEAAAKEAAAKEAAAKEAAAK

SEQ ID NO: 80 - protein, 260 aa, Artificial Sequence
  Synthetic polypeptide
  misc_feature (1)..(120): may be absent
  misc_feature (140)..(260): may be absent
SGGSSGGSSGGSSGGSSGGSSGGSSGGSSGGSSGGSSGGSSGGSSGGSSGGSSGGSSGGSSGSGGSSGGSSGGSSGGSSGGSSGGSSGGSSGGSSGGSSGGSSGGSSGGSSGGSSGGSSGGSSGSETPGTSESATPESSGGSSGGSSGGSSGGSSGGSSGGSSGGSSGGSSGGSSGGSSGGSSGGSSGGSSGGSSGGSSGGSSGGSSGGSSGGSSGGSSGGSSGGSSGGSSGGSSGGSSGGSSGGSSGGSSGGSSGGSSG

SEQ ID NO: 81 - protein, 24 aa, Artificial Sequence
  Synthetic polypeptide
SGGSSGSETPGTSESATPESSGGS

SEQ ID NO: 82 - protein, 32 aa, Artificial Sequence; identical to SEQ ID NO: 75
  Synthetic polypeptide

SEQ ID NO: 83 - protein, 104 aa, Artificial Sequence
  Synthetic polypeptide
GGSGGSPGSPAGSPTSTEEGTSESATPESGPGTSTEPSEGSAPGSPAGSPTSTEEGTSTEPSEGSAPGTSTEPSEGSAPGTSESATPESGPGSEPATSGGSGGS

SEQ ID NO: 84 - protein, 24 aa, Artificial Sequence
  Synthetic polypeptide
SGGSSGGSSGSETPGTSESATPES

SEQ ID NO: 85 - protein, 40 aa, Artificial Sequence
  Synthetic polypeptide
SGGSSGGSSGSETPGTSESATPESSGGSSGGSSGGSSGGS

SEQ ID NO: 86 - protein, 64 aa, Artificial Sequence
  Synthetic polypeptide
SGGSSGGSSGSETPGTSESATPESSGGSSGGSSGGSSGGSSGSETPGTSESATPESSGGSSGGS

SEQ ID NO: 87 - protein, 92 aa, Artificial Sequence
  Synthetic polypeptide
PGSPAGSPTSTEEGTSESATPESGPGTSTEPSEGSAPGSPAGSPTSTEEGTSTEPSEGSAPGTSTEPSEGSAPGTSESATPESGPGSEPATS

SEQ ID NO: 88 - protein, 1561 aa, Artificial Sequence
  Synthetic polypeptide
MSEVEFSHEYWMRHALTLAKRAWDEREVPVGAVLVHNNRVIGEGWNRPIGRHDPTAHAEIMALRQGGLVMQNYRLIDATLYVTLEPCVMCAGAMIHSRIGRVVFGARDAKTGAAGSLMDVLHHPGMNHRVEITEGILADECAALLSDFFRMRRQEIKAQKKAQSSTDSGSETPGTSESATPESDKKYSIGLAIGTNSVGWAVITDEYKVPSKKFKVLGNTDRHSIKKNLIGALLFDSGETAEATRLKRTARRRYTRRKNRICYLQEIFSNEMAKVDDSFFHRLEESFLVEEDKKHERHPIFGNIVDEVAYHEKYPTIYHLRKKLVDSTDKADLRLIYLALAHMIKFRGHFLIEGDLNPDNSDVDKLFIQLVQTYNQLFEENPINASGVDAKAILSARLSKSRRLENLIAQLPGEKKNGLFGNLIALSLGLTPNFKSNFDLAEDAKLQLSKDTYDDDLDNLLAQIGDQYADLFLAAKNLSDAILLSDILRVNTEITKAPLSASMIKRYDEHHQDLTLLKALVRQQLPEKYKEIFFDQSKNGYAGYIDGGASQEEFYKFIKPILEKMDGTEELLVKLNREDLLRKQRTFDNGSIPHQIHLGELHAILRRQEDFYPFLKDNREKIEKILTFRIPYYVGPLARGNSRFAWMTRKSEETITPWNFEEVVDKGASAQSFIERMTNFDKNLPNEKVLPKHSLLYEYFTVYNELTKVKYVTEGMRKPAFLSGEQKKAIVDLLFKTNRKVTVKQLKEDYFKKIECFDSVEISGVEDRFNASLGTYHDLLKIIKDKDFLDNEENEDILEDIVLTLTLFEDREMIEERLKTYAHLFDDKVMKQLKRRRYTGWGRLSRKLINGIRDKQSGKTILDFLKSDGFANRNFMQLIHDDSLTFKEDIQKAQVSGQGDSLHEHIANLAGSPAIKKGILQTVKVVDELVKVMGRHKPENIVIEMARENQTTQKGQKNSRERMKRIEEGIKELGSQILKEHPVENTQLQNEKLYLYYLQNGRDMYVDQELDINRLSDYDVDHIVPQSFLKDDSIDNKVLTRSDKNRGKSDNVPSEEVVKKMKNYWRQLLNAKLITQRKFDNLTKAERGGLSELDKAGFIKRQLVETRQITKHVAQILDSRMNTKYDENDKLIREVKVITLKSKLVSDFRKDFQFYKVREINNYHHAHDAYLNAVVGTALIKKYPKLESEFVYGDYKVYDVRKMIAKSEQEIGKATAKYFFYSNIMNFFKTEITLANGEIRKRPLIETNGETGEIVWDKGRDFATVRKVLSMPQVNIVKKTEVQTGGFSKESILPKRNSDKLIARKKDWDPKKYGGFDSPTVAYSVLVVAKVEKGKSKKLKSVKELLGITIMERSSFEKNPIDFLEAKGYKEVKKDLIIKLPKYSLFELENGRKRMLASAGELQKGNELALPSKYVNFLYLASHYEKLKGSPEDNEQKQLFVEQHKHYLDEIIEQISEFSKRVILADANLDKVLSAYNKHRDKPIREQAENIIHLFTLTNLGAPAAFKYFDTTIDRKRYTSTKEVLDATLIHQSITGLYETRIDLSQLGGDSGGSPKKKRKV

SEQ ID NO: 89 - protein, 1561 aa, Artificial Sequence
  Synthetic polypeptide
MSEVEFSHEYWMRHALTLAKRAWDEREVPVGAVLVHNNRVIGEGWNRPIGRHDPTAHAEIMALRQGGLVMQNYRLIDATLYVTLEPCVMCAGAMIHSRIGRVVFGARNAKTGAAGSLMDVLHHPGMNHRVEITEGILADECAALLSDFFRMRRQEIKAQKKAQSSTDSGSETPGTSESATPESDKKYSIGLAIGTNSVGWAVITDEYKVPSKKFKVLGNTDRHSIKKNLIGALLFDSGETAEATRLKRTARRRYTRRKNRICYLQEIFSNEMAKVDDSFFHRLEESFLVEEDKKHERHPIFGNIVDEVAYHEKYPTIYHLRKKLVDSTDKADLRLIYLALAHMIKFRGHFLIEGDLNPDNSDVDKLFIQLVQTYNQLFEENPINASGVDAKAILSARLSKSRRLENLIAQLPGEKKNGLFGNLIALSLGLTPNFKSNFDLAEDAKLQLSKDTYDDDLDNLLAQIGDQYADLFLAAKNLSDAILLSDILRVNTEITKAPLSASMIKRYDEHHQDLTLLKALVRQQLPEKYKEIFFDQSKNGYAGYIDGGASQEEFYKFIKPILEKMDGTEELLVKLNREDLLRKQRTFDNGSIPHQIHLGELHAILRRQEDFYPFLKDNREKIEKILTFRIPYYVGPLARGNSRFAWMTRKSEETITPWNFEEVVDKGASAQSFIERMTNFDKNLPNEKVLPKHSLLYEYFTVYNELTKVKYVTEGMRKPAFLSGEQKKAIVDLLFKTNRKVTVKQLKEDYFKKIECFDSVEISGVEDRFNASLGTYHDLLKIIKDKDFLDNEENEDILEDIVLTLTLFEDREMIEERLKTYAHLFDDKVMKQLKRRRYTGWGRLSRKLINGIRDKQSGKTILDFLKSDGFANRNFMQLIHDDSLTFKEDIQKAQVSGQGDSLHEHIANLAGSPAIKKGILQTVKVVDELVKVMGRHKPENIVIEMARENQTTQKGQKNSRERMKRIEEGIKELGSQILKEHPVENTQLQNEKLYLYYLQNGRDMYVDQELDINRLSDYDVDHIVPQSFLKDDSIDNKVLTRSDKNRGKSDNVPSEEVVKKMKNYWRQLLNAKLITQRKFDNLTKAERGGLSELDKAGFIKRQLVETRQITKHVAQILDSRMNTKYDENDKLIREVKVITLKSKLVSDFRKDFQFYKVREINNYHHAHDAYLNAVVGTALIKKYPKLESEFVYGDYKVYDVRKMIAKSEQEIGKATAKYFFYSNIMNFFKTEITLANGEIRKRPLIETNGETGEIVWDKGRDFATVRKVLSMPQVNIVKKTEVQTGGFSKESILPKRNSDKLIARKKDWDPKKYGGFDSPTVAYSVLVVAKVEKGKSKKLKSVKELLGITIMERSSFEKNPIDFLEAKGYKEVKKDLIIKLPKYSLFELENGRKRMLASAGELQKGNELALPSKYVNFLYLASHYEKLKGSPEDNEQKQLFVEQHKHYLDEIIEQISEFSKRVILADANLDKVLSAYNKHRDKPIREQAENIIHLFTLTNLGAPAAFKYFDTTIDRKRYTSTKEVLDATLIHQSITGLYETRIDLSQLGGDSGGSPKKKRKV

SEQ ID NO: 90 - protein, 1561 aa, Artificial Sequence
  Synthetic polypeptide
MSEVEFSHEYWMRHALTLAKRAWDEREVPVGAVLVHNNRVIGEGWNRPIGRHDPTAHAEIMALRQGGLVMQNYRLIDATLYVTLEPCVMCAGAMIHSRIGRVVFGARGAKTGAAGSLMDVLHHPGMNHRVEITEGILADECAALLSDFFRMRRQEIKAQKKAQSSTDSGSETPGTSESATPESDKKYSIGLAIGTNSVGWAVITDEYKVPSKKFKVLGNTDRHSIKKNLIGALLFDSGETAEATRLKRTARRRYTRRKNRICYLQEIFSNEMAKVDDSFFHRLEESFLVEEDKKHERHPIFGNIVDEVAYHEKYPTIYHLRKKLVDSTDKADLRLIYLALAHMIKFRGHFLIEGDLNPDNSDVDKLFIQLVQTYNQLFEENPINASGVDAKAILSARLSKSRRLENLIAQLPGEKKNGLFGNLIALSLGLTPNFKSNFDLAEDAKLQLSKDTYDDDLDNLLAQIGDQYADLFLAAKNLSDAILLSDILRVNTEITKAPLSASMIKRYDEHHQDLTLLKALVRQQLPEKYKEIFFDQSKNGYAGYIDGGASQEEFYKFIKPILEKMDGTEELLVKLNREDLLRKQRTFDNGSIPHQIHLGELHAILRRQEDFYPFLKDNREKIEKILTFRIPYYVGPLARGNSRFAWMTRKSEETITPWNFEEVVDKGASAQSFIERMTNFDKNLPNEKVLPKHSLLYEYFTVYNELTKVKYVTEGMRKPAFLSGEQKKAIVDLLFKTNRKVTVKQLKEDYFKKIECFDSVEISGVEDRFNASLGTYHDLLKIIKDKDFLDNEENEDILEDIVLTLTLFEDREMIEERLKTYAHLFDDKVMKQLKRRRYTGWGRLSRKLINGIRDKQSGKTILDFLKSDGFANRNFMQLIHDDSLTFKEDIQKAQVSGQGDSLHEHIANLAGSPAIKKGILQTVKVVDELVKVMGRHKPENIVIEMARENQTTQKGQKNSRERMKRIEEGIKELGSQILKEHPVENTQLQNEKLYLYYLQNGRDMYVDQELDINRLSDYDVDHIVPQSFLKDDSIDNKVLTRSDKNRGKSDNVPSEEVVKKMKNYWRQLLNAKLITQRKFDNLTKAERGGLSELDKAGFIKRQLVETRQITKHVAQILDSRMNTKYDENDKLIREVKVITLKSKLVSDFRKDFQFYKVREINNYHHAHDAYLNAVVGTALIKKYPKLESEFVYGDYKVYDVRKMIAKSEQEIGKATAKYFFYSNIMNFFKTEITLANGEIRKRPLIETNGETGEIVWDKGRDFATVRKVLSMPQVNIVKKTEVQTGGFSKESILPKRNSDKLIARKKDWDPKKYGGFDSPTVAYSVLVVAKVEKGKSKKLKSVKELLGITIMERSSFEKNPIDFLEAKGYKEVKKDLIIKLPKYSLFELENGRKRMLASAGELQKGNELALPSKYVNFLYLASHYEKLKGSPEDNEQKQLFVEQHKHYLDEIIEQISEFSKRVILADANLDKVLSAYNKHRDKPIREQAENIIHLFTLTNLGAPAAFKYFDTTIDRKRYTSTKEVLDATLIHQSITGLYETRIDLSQLGGDSGGSPKKKRKV

SEQ ID NO: 91 - protein, 1561 aa, Artificial Sequence
  Synthetic polypeptide
MSEVEFSHEYWMRHALTLAKRAWDEREVPVGAVLVHNNRVIGEGWNRPIGRHDPTAHAEIMALRQGGLVMQNYRLIDATLYVTLEPCVMCAGAMIHSRIGRVVFGARVAKTGAAGSLMDVLHHPGMNHRVEITEGILADECAALLSDFFRMRRQEIKAQKKAQSSTDSGSETPGTSESATPESDKKYSIGLAIGTNSVGWAVITDEYKVPSKKFKVLGNTDRHSIKKNLIGALLFDSGETAEATRLKRTARRRYTRRKNRICYLQEIFSNEMAKVDDSFFHRLEESFLVEEDKKHERHPIFGNIVDEVAYHEKYPTIYHLRKKLVDSTDKADLRLIYLALAHMIKFRGHFLIEGDLNPDNSDVDKLFIQLVQTYNQLFEENPINASGVDAKAILSARLSKSRRLENLIAQLPGEKKNGLFGNLIALSLGLTPNFKSNFDLAEDAKLQLSKDTYDDDLDNLLAQIGDQYADLFLAAKNLSDAILLSDILRVNTEITKAPLSASMIKRYDEHHQDLTLLKALVRQQLPEKYKEIFFDQSKNGYAGYIDGGASQEEFYKFIKPILEKMDGTEELLVKLNREDLLRKQRTFDNGSIPHQIHLGELHAILRRQEDFYPFLKDNREKIEKILTFRIPYYVGPLARGNSRFAWMTRKSEETITPWNFEEVVDKGASAQSFIERMTNFDKNLPNEKVLPKHSLLYEYFTVYNELTKVKYVTEGMRKPAFLSGEQKKAIVDLLFKTNRKVTVKQLKEDYFKKIECFDSVEISGVEDRFNASLGTYHDLLKIIKDKDFLDNEENEDILEDIVLTLTLFEDREMIEERLKTYAHLFDDKVMKQLKRRRYTGWGRLSRKLINGIRDKQSGKTILDFLKSDGFANRNFMQLIHDDSLTFKEDIQKAQVSGQGDSLHEHIANLAGSPAIKKGILQTVKVVDELVKVMGRHKPENIVIEMARENQTTQKGQKNSRERMKRIEEGIKELGSQILKEHPVENTQLQNEKLYLYYLQNGRDMYVDQELDINRLSDYDVDHIVPQSFLKDDSIDNKVLTRSDKNRGKSDNVPSEEVVKKMKNYWRQLLNAKLITQRKFDNLTKAERGGLSELDKAGFIKRQLVETRQITKHVAQILDSRMNTKYDENDKLIREVKVITLKSKLVSDFRKDFQFYKVREINNYHHAHDAYLNAVVGTALIKKYPKLESEFVYGDYKVYDVRKMIAKSEQEIGKATAKYFFYSNIMNFFKTEITLANGEIRKRPLIETNGETGEIVWDKGRDFATVRKVLSMPQVNIVKKTEVQTGGFSKESILPKRNSDKLIARKKDWDPKKYGGFDSPTVAYSVLVVAKVEKGKSKKLKSVKELLGITIMERSSFEKNPIDFLEAKGYKEVKKDLIIKLPKYSLFELENGRKRMLASAGELQKGNELALPSKYVNFLYLASHYEKLKGSPEDNEQKQLFVEQHKHYLDEIIEQISEFSKRVILADANLDKVLSAYNKHRDKPIREQAENIIHLFTLTNLGAPAAFKYFDTTIDRKRYTSTKEVLDATLIHQSITGLYETRIDLSQLGGDSGGSPKKKRKV

SEQ ID NO: 92 - protein, 1550 aa, Artificial Sequence
  Synthetic polypeptide
MSEVEFSYEYWMRHALTLAKRAWDEREVPVGAVLVHNNRVIGEGWNRPIGRHDPTAHAEIMALRQGGLVMQNYRLIDATLYVTLEPCVMCAGAMIHSRIGRVVFGARNAKTGAAGSLMDVLHHPGMSHRVEITEGILADECAALLSDFFRMRRQEIKAQKKAQSSTDSGSETPGTSESATPESDKKYSIGLAIGTNSVGWAVITDEYKVPSKKFKVLGNTDRHSIKKNLIGALLFDSGETAEATRLKRTARRRYTRRKNRICYLQEIFSNEMAKVDDSFFHRLEESFLVEEDKKHERHPIFGNIVDEVAYHEKYPTIYHLRKKLVDSTDKADLRLIYLALAHMIKFRGHFLIEGDLNPDNSDVDKLFIQLVQTYNQLFEENPINASGVDAKAILSARLSKSRRLENLIAQLPGEKKNGLFGNLIALSLGLTPNFKSNFDLAEDAKLQLSKDTYDDDLDNLLAQIGDQYADLFLAAKNLSDAILLSDILRVNTEITKAPLSASMIKRYDEHHQDLTLLKALVRQQLPEKYKEIFFDQSKNGYAGYIDGGASQEEFYKFIKPILEKMDGTEELLVKLNREDLLRKQRTFDNGSIPHQIHLGELHAILRRQEDFYPFLKDNREKIEKILTFRIPYYVGPLARGNSRFAWMTRKSEETITPWNFEEVVDKGASAQSFIERMTNFDKNLPNEKVLPKHSLLYEYFTVYNELTKVKYVTEGMRKPAFLSGEQKKAIVDLLFKTNRKVTVKQLKEDYFKKIECFDSVEISGVEDRFNASLGTYHDLLKIIKDKDFLDNEENEDILEDIVLTLTLFEDREMIEERLKTYAHLFDDKVMKQLKRRRYTGWGRLSRKLINGIRDKQSGKTILDFLKSDGFANRNFMQLIHDDSLTFKEDIQKAQVSGQGDSLHEHIANLAGSPAIKKGILQTVKVVDELVKVMGRHKPENIVIEMARENQTTQKGQKNSRERMKRIEEGIKELGSQILKEHPVENTQLQNEKLYLYYLQNGRDMYVDQELDINRLSDYDVDAIVPQSFLKDDSIDNKVLTRSDKNRGKSDNVPSEEVVKKMKNYWRQLLNAKLITQRKFDNLTKAERGGLSELDKAGFIKRQLVETRQITKHVAQILDSRMNTKYDENDKLIREVKVITLKSKLVSDFRKDFQFYKVREINNYHHAHDAYLNAVVGTALIKKYPKLESEFVYGDYKVYDVRKMIAKSEQEIGKATAKYFFYSNIMNFFKTEITLANGEIRKRPLIETNGETGEIVWDKGRDFATVRKVLSMPQVNIVKKTEVQTGGFSKESILPKRNSDKLIARKKDWDPKKYGGFDSPTVAYSVLVVAKVEKGKSKKLKSVKELLGITIMERSSFEKNPIDFLEAKGYKEVKKDLIIKLPKYSLFELENGRKRMLASAGELQKGNELALPSKYVNFLYLASHYEKLKGSPEDNEQKQLFVEQHKHYLDEIIEQISEFSKRVILADANLDKVLSAYNKHRDKPIREQAENIIHLFTLTNLGAPAAFKYFDTTIDRKRYTSTKEVLDATLIHQSITGLYETRIDLSQLGGD

SEQ ID NO: 93 - protein, 1550 aa, Artificial Sequence
  Synthetic polypeptide
  misc_feature (155)..(155): Xaa can be any naturally occurring amino acid
MSEVEFSYEYWMRHALTLAKRAWDEREVPVGAVLVHNNRVIGEGWNRPIGRHDPTAHAEIMALRQGGLVMQNYRLIDATLYVTLEPCVMCAGAMIHSRIGRVVFGARNAKTGAAGSLMDVLHHPGMSHRVEITEGILADECAALLSDFFRMRRQXIKAQKKAQSSTDSGSETPGTSESATPESDKKYSIGLAIGTNSVGWAVITDEYKVPSKKFKVLGNTDRHSIKKNLIGALLFDSGETAEATRLKRTARRRYTRRKNRICYLQEIFSNEMAKVDDSFFHRLEESFLVEEDKKHERHPIFGNIVDEVAYHEKYPTIYHLRKKLVDSTDKADLRLIYLALAHMIKFRGHFLIEGDLNPDNSDVDKLFIQLVQTYNQLFEENPINASGVDAKAILSARLSKSRRLENLIAQLPGEKKNGLFGNLIALSLGLTPNFKSNFDLAEDAKLQLSKDTYDDDLDNLLAQIGDQYADLFLAAKNLSDAILLSDILRVNTEITKAPLSASMIKRYDEHHQDLTLLKALVRQQLPEKYKEIFFDQSKNGYAGYIDGGASQEEFYKFIKPILEKMDGTEELLVKLNREDLLRKQRTFDNGSIPHQIHLGELHAILRRQEDFYPFLKDNREKIEKILTFRIPYYVGPLARGNSRFAWMTRKSEETITPWNFEEVVDKGASAQSFIERMTNFDKNLPNEKVLPKHSLLYEYFTVYNELTKVKYVTEGMRKPAFLSGEQKKAIVDLLFKTNRKVTVKQLKEDYFKKIECFDSVEISGVEDRFNASLGTYHDLLKIIKDKDFLDNEENEDILEDIVLTLTLFEDREMIEERLKTYAHLFDDKVMKQLKRRRYTGWGRLSRKLINGIRDKQSGKTILDFLKSDGFANRNFMQLIHDDSLTFKEDIQKAQVSGQGDSLHEHIANLAGSPAIKKGILQTVKVVDELVKVMGRHKPENIVIEMARENQTTQKGQKNSRERMKRIEEGIKELGSQILKEHPVENTQLQNEKLYLYYLQNGRDMYVDQELDINRLSDYDVDAIVPQSFLKDDSIDNKVLTRSDKNRGKSDNVPSEEVVKKMKNYWRQLLNAKLITQRKFDNLTKAERGGLSELDKAGFIKRQLVETRQITKHVAQILDSRMNTKYDENDKLIREVKVITLKSKLVSDFRKDFQFYKVREINNYHHAHDAYLNAVVGTALIKKYPKLESEFVYGDYKVYDVRKMIAKSEQEIGKATAKYFFYSNIMNFFKTEITLANGEIRKRPLIETNGETGEIVWDKGRDFATVRKVLSMPQVNIVKKTEVQTGGFSKESILPKRNSDKLIARKKDWDPKKYGGFDSPTVAYSVLVVAKVEKGKSKKLKSVKELLGITIMERSSFEKNPIDFLEAKGYKEVKKDLIIKLPKYSLFELENGRKRMLASAGELQKGNELALPSKYVNFLYLASHYEKLKGSPEDNEQKQLFVEQHKHYLDEIIEQISEFSKRVILADANLDKVLSAYNKHRDKPIREQAENIIHLFTLTNLGAPAAFKYFDTTIDRKRYTSTKEVLDATLIHQSITGLYETRIDLSQLGGD

SEQ ID NO: 94 - protein, 1775 aa, Artificial Sequence
  Synthetic polypeptide
MSEVEFSHEYWMRHALTLAKRAWDEREVPVGAVLVHNNRVIGEGWNRPIGRHDPTAHAEIMALRQGGLVMQNYRLIDATLYVTLEPCVMCAGAMIHSRIGRVVFGARDAKTGAAGSLMDVLHHPGMNHRVEITEGILADECAALLSDFFRMRRQEIKAQKKAQSSTDSGGSSGGSSGSETPGTSESATPESSGGSSGGSSEVEFSHEYWMRHALTLAKRALDEREVPVGAVLVLNNRVIGEGWNRAIGLHDPTAHAEIMALRQGGLVMQNYRLIDATLYVTFEPCVMCAGAMIHSRIGRVVFGVRNAKTGAAGSLMDVLHYPGMNHRVEITEGILADECAALLCYFFRMPRQVFNAQKKAQSSTDSGGSSGGSSGSETPGTSESATPESSGGSSGGSDKKYSIGLAIGTNSVGWAVITDEYKVPSKKFKVLGNTDRHSIKKNLIGALLFDSGETAEATRLKRTARRRYTRRKNRICYLQEIFSNEMAKVDDSFFHRLEESFLVEEDKKHERHPIFGNIVDEVAYHEKYPTIYHLRKKLVDSTDKADLRLIYLALAHMIKFRGHFLIEGDLNPDNSDVDKLFIQLVQTYNQLFEENPINASGVDAKAILSARLSKSRRLENLIAQLPGEKKNGLFGNLIALSLGLTPNFKSNFDLAEDAKLQLSKDTYDDDLDNLLAQIGDQYADLFLAAKNLSDAILLSDILRVNTEITKAPLSASMIKRYDEHHQDLTLLKALVRQQLPEKYKEIFFDQSKNGYAGYIDGGASQEEFYKFIKPILEKMDGTEELLVKLNREDLLRKQRTFDNGSIPHQIHLGELHAILRRQEDFYPFLKDNREKIEKILTFRIPYYVGPLARGNSRFAWMTRKSEETITPWNFEEVVDKGASAQSFIERMTNFDKNLPNEKVLPKHSLLYEYFTVYNELTKVKYVTEGMRKPAFLSGEQKKAIVDLLFKTNRKVTVKQLKEDYFKKIECFDSVEISGVEDRFNASLGTYHDLLKIIKDKDFLDNEENEDILEDIVLTLTLFEDREMIEERLKTYAHLFDDKVMKQLKRRRYTGWGRLSRKLINGIRDKQSGKTILDFLKSDGFANRNFMQLIHDDSLTFKEDIQKAQVSGQGDSLHEHIANLAGSPAIKKGILQTVKVVDELVKVMGRHKPENIVIEMARENQTTQKGQKNSRERMKRIEEGIKELGSQILKEHPVENTQLQNEKLYLYYLQNGRDMYVDQELDINRLSDYDVDHIVPQSFLKDDSIDNKVLTRSDKNRGKSDNVPSEEVVKKMKNYWRQLLNAKLITQRKFDNLTKAERGGLSELDKAGFIKRQLVETRQITKHVAQILDSRMNTKYDENDKLIREVKVITLKSKLVSDFRKDFQFYKVREINNYHHAHDAYLNAVVGTALIKKYPKLESEFVYGDYKVYDVRKMIAKSEQEIGKATAKYFFYSNIMNFFKTEITLANGEIRKRPLIETNGETGEIVWDKGRDFATVRKVLSMPQVNIVKKTEVQTGGFSKESILPKRNSDKLIARKKDWDPKKYGGFDSPTVAYSVLVVAKVEKGKSKKLKSVKELLGITIMERSSFEKNPIDFLEAKGYKEVKKDLIIKLPKYSLFELENGRKRMLASAGELQKGNELALPSKYVNFLYLASHYEKLKGSPEDNEQKQLFVEQHKHYLDEIIEQISEFSKRVILADANLDKVLSAYNKHRDKPIREQAENIIHLFTLTNLGAPAAFKYFDTTIDRKRYTSTKEVLDATLIHQSITGLYETRIDLSQLGGDSGGSPKKKRKV

SEQ ID NO: 95 - protein, 1767 aa, Artificial Sequence
  Synthetic polypeptide
MSEVEFSHEYWMRHALTLAKRAWDEREVPVGAVLVHNNRVIGEGWNRPIGRHDPTAHAEIMALRQGGLVMQNYRLIDATLYVTLEPCVMCAGAMIHSRIGRVVFGARDAKTGAAGSLMDVLHHPGMNHRVEITEGILADECAALLSDFFRMRRQEIKAQKKAQSSTDSGGSSGGSSGSETPGTSESATPESSGGSSGGSSEVEFSHEYWMRHALTLAKRARDEREVPVGAVLVLNNRVIGEGWNRAIGLHDPTAHAEIMALRQGGLVMQNYRLIDATLYVTFEPCVMCAGAMIHSRIGRVVFGVRNAKTGAAGSLMDVLHYPGMNHRVEITEGILADECAALLCYFFRMPRQVFNAQKKAQSSTDSGGSSGGSSGSETPGTSESATPESDKKYSIGLAIGTNSVGWAVITDEYKVPSKKFKVLGNTDRHSIKKNLIGALLFDSGETAEATRLKRTARRRYTRRKNRICYLQEIFSNEMAKVDDSFFHRLEESFLVEEDKKHERHPIFGNIVDEVAYHEKYPTIYHLRKKLVDSTDKADLRLIYLALAHMIKFRGHFLIEGDLNPDNSDVDKLFIQLVQTYNQLFEENPINASGVDAKAILSARLSKSRRLENLIAQLPGEKKNGLFGNLIALSLGLTPNFKSNFDLAEDAKLQLSKDTYDDDLDNLLAQIGDQYADLFLAAKNLSDAILLSDILRVNTEITKAPLSASMIKRYDEHHQDLTLLKALVRQQLPEKYKEIFFDQSKNGYAGYIDGGASQEEFYKFIKPILEKMDGTEELLVKLNREDLLRKQRTFDNGSIPHQIHLGELHAILRRQEDFYPFLKDNREKIEKILTFRIPYYVGPLARGNSRFAWMTRKSEETITPWNFEEVVDKGASAQSFIERMTNFDKNLPNEKVLPKHSLLYEYFTVYNELTKVKYVTEGMRKPAFLSGEQKKAIVDLLFKTNRKVTVKQLKEDYFKKIECFDSVEISGVEDRFNASLGTYHDLLKIIKDKDFLDNEENEDILEDIVLTLTLFEDREMIEERLKTYAHLFDDKVMKQLKRRRYTGWGRLSRKLINGIRDKQSGKTILDFLKSDGFANRNFMQLIHDDSLTFKEDIQKAQVSGQGDSLHEHIANLAGSPAIKKGILQTVKVVDELVKVMGRHKPENIVIEMARENQTTQKGQKNSRERMKRIEEGIKELGSQILKEHPVENTQLQNEKLYLYYLQNGRDMYVDQELDINRLSDYDVDHIVPQSFLKDDSIDNKVLTRSDKNRGKSDNVPSEEVVKKMKNYWRQLLNAKLITQRKFDNLTKAERGGLSELDKAGFIKRQLVETRQITKHVAQILDSRMNTKYDENDKLIREVKVITLKSKLVSDFRKDFQFYKVREINNYHHAHDAYLNAVVGTALIKKYPKLESEFVYGDYKVYDVRKMIAKSEQEIGKATAKYFFYSNIMNFFKTEITLANGEIRKRPLIETNGETGEIVWDKGRDFATVRKVLSMPQVNIVKKTEVQTGGFSKESILPKRNSDKLIARKKDWDPKKYGGFDSPTVAYSVLVVAKVEKGKSKKLKSVKELLGITIMERSSFEKNPIDFLEAKGYKEVKKDLIIKLPKYSLFELENGRKRMLASAGELQKGNELALPSKYVNFLYLASHYEKLKGSPEDNEQKQLFVEQHKHYLDEIIEQISEFSKRVILADANLDKVLSAYNKHRDKPIREQAENIIHLFTLTNLGAPAAFKYFDTTIDRKRYTSTKEVLDATLIHQSITGLYETRIDLSQLGGDSGGSPKKKRKV

SEQ ID NO: 96 - protein, 1775 aa, Artificial Sequence
  Synthetic polypeptide
MSEVEFSHEYWMRHALTLAKRAWDEREVPVGAVLVHNNRVIGEGWNRPIGRHDPTAHAEIMALRQGGLVMQNYRLIDATLYVTLEPCVMCAGAMIHSRIGRVVFGARDAKTGAAGSLMDVLHHPGMNHRVEITEGILADECAALLSDFFRMRRQEIKAQKKAQSSTDSGGSSGGSSGSETPGTSESATPESSGGSSGGSSEVEFSHEYWMRHALTLAKRAWDEREVPVGAVLVHNNRVIGEGWNRPIGRHDPTAHAEIMALRQGGLVMQNYRLIDATLYVTFEPCVMCAGAMIHSRIGRVVFGVRNAKTGAAGSLMDVLHYPGMNHRVEITEGILADECAALLSYFFRMRRQVFKAQKKAQSSTDSGGSSGGSSGSETPGTSESATPESSGGSSGGSDKKYSIGLAIGTNSVGWAVITDEYKVPSKKFKVLGNTDRHSIKKNLIGALLFDSGETAEATRLKRTARRRYTRRKNRICYLQEIFSNEMAKVDDSFFHRLEESFLVEEDKKHERHPIFGNIVDEVAYHEKYPTIYHLRKKLVDSTDKADLRLIYLALAHMIKFRGHFLIEGDLNPDNSDVDKLFIQLVQTYNQLFEENPINASGVDAKAILSARLSKSRRLENLIAQLPGEKKNGLFGNLIALSLGLTPNFKSNFDLAEDAKLQLSKDTYDDDLDNLLAQIGDQYADLFLAAKNLSDAILLSDILRVNTEITKAPLSASMIKRYDEHHQDLTLLKALVRQQLPEKYKEIFFDQSKNGYAGYIDGGASQEEFYKFIKPILEKMDGTEELLVKLNREDLLRKQRTFDNGSIPHQIHLGELHAILRRQEDFYPFLKDNREKIEKILTFRIPYYVGPLARGNSRFAWMTRKSEETITPWNFEEVVDKGASAQSFIERMTNFDKNLPNEKVLPKHSLLYEYFTVYNELTKVKYVTEGMRKPAFLSGEQKKAIVDLLFKTNRKVTVKQLKEDYFKKIECFDSVEISGVEDRFNASLGTYHDLLKIIKDKDFLDNEENEDILEDIVLTLTLFEDREMIEERLKTYAHLFDDKVMKQLKRRRYTGWGRLSRKLINGIRDKQSGKTILDFLKSDGFANRNFMQLIHDDSLTFKEDIQKAQVSGQGDSLHEHIANLAGSPAIKKGILQTVKVVDELVKVMGRHKPENIVIEMARENQTTQKGQKNSRERMKRIEEGIKELGSQILKEHPVENTQLQNEKLYLYYLQNGRDMYVDQELDINRLSDYDVDHIVPQSFLKDDSIDNKVLTRSDKNRGKSDNVPSEEVVKKMKNYWRQLLNAKLITQRKFDNLTKAERGGLSELDKAGFIKRQLVETRQITKHVAQILDSRMNTKYDENDKLIREVKVITLKSKLVSDFRKDFQFYKVREINNYHHAHDAYLNAVVGTALIKKYPKLESEFVYGDYKVYDVRKMIAKSEQEIGKATAKYFFYSNIMNFFKTEITLANGEIRKRPLIETNGETGEIVWDKGRDFATVRKVLSMPQVNIVKKTEVQTGGFSKESILPKRNSDKLIARKKDWDPKKYGGFDSPTVAYSVLVVAKVEKGKSKKLKSVKELLGITIMERSSFEKNPIDFLEAKGYKEVKKDLIIKLPKYSLFELENGRKRMLASAGELQKGNELALPSKYVNFLYLASHYEKLKGSPEDNEQKQLFVEQHKHYLDEIIEQISEFSKRVILADANLDKVLSAYNKHRDKPIREQAENIIHLFTLTNLGAPAAFKYFDTTIDRKRYTSTKEVLDATLIHQSITGLYETRIDLSQLGGDSGGSPKKKRKV

SEQ ID NO: 97 - protein, 1775 aa, Artificial Sequence
  Synthetic polypeptide
MSEVEFSHEYWMRHALTLAKRAWDEREVPVGAVLVHNNRVIGEGWNRPIGRHDPTAHAEIMALRQGGLVMQNYRLIDATLYVTLEPCVMCAGAMIHSRIGRVVFGARDAKTGAAGSLMDVLHHPGMNHRVEITEGILADECAALLSDFFRMRRQEIKAQKKAQSSTDSGGSSGGSSGSETPGTSESATPESSGGSSGGSSEVEFSHEYWMRHALTLAKRAWDEREVPVGAVLVLNNRVIGEGWNRPIGLHDPTAHAEIMALRQGGLVMQNYRLIDATLYVTFEPCVMCAGAMIHSRIGRVVFGVRNAKTGAAGSLMDVLHYPGMNHRVEITEGILADECAALLCYFFRMRRQVFNAQKKAQSSTDSGGSSGGSSGSETPGTSESATPESSGGSSGGSDKKYSIGLAIGTNSVGWAVITDEYKVPSKKFKVLGNTDRHSIKKNLIGALLFDSGETAEATRLKRTARRRYTRRKNRICYLQEIFSNEMAKVDDSFFHRLEESFLVEEDKKHERHPIFGNIVDEVAYHEKYPTIYHLRKKLVDSTDKADLRLIYLALAHMIKFRGHFLIEGDLNPDNSDVDKLFIQLVQTYNQLFEENPINASGVDAKAILSARLSKSRRLENLIAQLPGEKKNGLFGNLIALSLGLTPNFKSNFDLAEDAKLQLSKDTYDDDLDNLLAQIGDQYADLFLAAKNLSDAILLSDILRVNTEITKAPLSASMIKRYDEHHQDLTLLKALVRQQLPEKYKEIFFDQSKNGYAGYIDGGASQEEFYKFIKPILEKMDGTEELLVKLNREDLLRKQRTFDNGSIPHQIHLGELHAILRRQEDFYPFLKDNREKIEKILTFRIPYYVGPLARGNSRFAWMTRKSEETITPWNFEEVVDKGASAQSFIERMTNFDKNLPNEKVLPKHSLLYEYFTVYNELTKVKYVTEGMRKPAFLSGEQKKAIVDLLFKTNRKVTVKQLKEDYFKKIECFDSVEISGVEDRFNASLGTYHDLLKIIKDKDFLDNEENEDILEDIVLTLTLFEDREMIEERLKTYAHLFDDKVMKQLKRRRYTGWGRLSRKLINGIRDKQSGKTILDFLKSDGFANRNFMQLIHDDSLTFKEDIQKAQVSGQGDSLHEHIANLAGSPAIKKGILQTVKVVDELVKVMGRHKPENIVIEMARENQTTQKGQKNSRERMKRIEEGIKELGSQILKEHPVENTQLQNEKLYLYYLQNGRDMYVDQELDINRLSDYDVDHIVPQSFLKDDSIDNKVLTRSDKNRGKSDNVPSEEVVKKMKNYWRQLLNAKLITQRKFDNLTKAERGGLSELDKAGFIKRQLVETRQITKHVAQILDSRMNTKYDENDKLIREVKVITLKSKLVSDFRKDFQFYKVREINNYHHAHDAYLNAVVGTALIKKYPKLESEFVYGDYKVYDVRKMIAKSEQEIGKATAKYFFYSNIMNFFKTEITLANGEIRKRPLIETNGETGEIVWDKGRDFATVRKVLSMPQVNIVKKTEVQTGGFSKESILPKRNSDKLIARKKDWDPKKYGGFDSPTVAYSVLVVAKVEKGKSKKLKSVKELLGITIMERSSFEKNPIDFLEAKGYKEVKKDLIIKLPKYSLFELENGRKRMLASAGELQKGNELALPSKYVNFLYLASHYEKLKGSPEDNEQKQLFVEQHKHYLDEIIEQISEFSKRVILADANLDKVLSAYNKHRDKPIREQAENIIHLFTLTNLGAPAAFKYFDTTIDRKRYTSTKEVLDATLIHQSITGLYETRIDLSQLGGDSGGSPKKKRKV

SEQ ID NO: 98 - protein, 1767 aa, Artificial Sequence
  Synthetic polypeptide
MSEVEFSHEYWMRHALTLAKRAWDEREVPVGAVLVHNNRVIGEGWNRPIGRHDPTAHAEIMALRQGGLVMQNYRLIDATLYVTLEPCVMCAGAMIHSRIGRVVFGARDAKTGAAGSLMDVLHHPGMNHRVEITEGILADECAALLSDFFRMRRQEIKAQKKAQSSTDSGGSSGGSSGSETPGTSESATPESSGGSSGGSSEVEFSHEYWMRHALTLAKRAWDEREVPVGAVLVLNNRVIGEGWNRPIGLHDPTAHAEIMALRQGGLVMQNYRLIDATLYVTFEPCVMCAGAMIHSRIGRVVFGVRNAKTGAAGSLMDVLHYPGMNHRVEITEGILADECAALLCYFFRMRRQVFNAQKKAQSSTDSGGSSGGSSGSETPGTSESATPESDKKYSIGLAIGTNSVGWAVITDEYKVPSKKFKVLGNTDRHSIKKNLIGALLFDSGETAEATRLKRTARRRYTRRKNRICYLQEIFSNEMAKVDDSFFHRLEESFLVEEDKKHERHPIFGNIVDEVAYHEKYPTIYHLRKKLVDSTDKADLRLIYLALAHMIKFRGHFLIEGDLNPDNSDVDKLFIQLVQTYNQLFEENPINASGVDAKAILSARLSKSRRLENLIAQLPGEKKNGLFGNLIALSLGLTPNFKSNFDLAEDAKLQLSKDTYDDDLDNLLAQIGDQYADLFLAAKNLSDAILLSDILRVNTEITKAPLSASMIKRYDEHHQDLTLLKALVRQQLPEKYKEIFFDQSKNGYAGYIDGGASQEEFYKFIKPILEKMDGTEELLVKLNREDLLRKQRTFDNGSIPHQIHLGELHAILRRQEDFYPFLKDNREKIEKILTFRIPYYVGPLARGNSRFAWMTRKSEETITPWNFEEVVDKGASAQSFIERMTNFDKNLPNEKVLPKHSLLYEYFTVYNELTKVKYVTEGMRKPAFLSGEQKKAIVDLLFKTNRKVTVKQLKEDYFKKIECFDSVEISGVEDRFNASLGTYHDLLKIIKDKDFLDNEENEDILEDIVLTLTLFEDREMIEERLKTYAHLFDDKVMKQLKRRRYTGWGRLSRKLINGIRDKQSGKTILDFLKSDGFANRNFMQLIHDDSLTFKEDIQKAQVSGQGDSLHEHIANLAGSPAIKKGILQTVKVVDELVKVMGRHKPENIVIEMARENQTTQKGQKNSRERMKRIEEGIKELGSQILKEHPVENTQLQNEKLYLYYLQNGRDMYVDQELDINRLSDYDVDHIVPQSFLKDDSIDNKVLTRSDKNRGKSDNVPSEEVVKKMKNYWRQLLNAKLITQRKFDNLTKAERGGLSELDKAGFIKRQLVETRQITKHVAQILDSRMNTKYDENDKLIREVKVITLKSKLVSDFRKDFQFYKVREINNYHHAHDAYLNAVVGTALIKKYPKLESEFVYGDYKVYDVRKMIAKSEQEIGKATAKYFFYSNIMNFFKTEITLANGEIRKRPLIETNGETGEIVWDKGRDFATVRKVLSMPQVNIVKKTEVQTGGFSKESILPKRNSDKLIARKKDWDPKKYGGFDSPTVAYSVLVVAKVEKGKSKKLKSVKELLGITIMERSSFEKNPIDFLEAKGYKEVKKDLIIKLPKYSLFELENGRKRMLASAGELQKGNELALPSKYVNFLYLASHYEKLKGSPEDNEQKQLFVEQHKHYLDEIIEQISEFSKRVILADANLDKVLSAYNKHRDKPIREQAENIIHLFTLTNLGAPAAFKYFDTTIDRKRYTSTKEVLDATLIHQSITGLYETRIDLSQLGGDSGGSPKKKRKV

SEQ ID NO: 99 - protein, 1775 aa, Artificial Sequence
  Synthetic polypeptide
MSEVEFSHEYWMRHALTLAKRAWDEREVPVGAVLVHNNRVIGEGWNRPIGRHDPTAHAEIMALRQGGLVMQNYRLIDATLYVTLEPCVMCAGAMIHSRIGRVVFGARDAKTGAAGSLMDVLHHPGMNHRVEITEGILADECAALLSDFFRMRRQEIKAQKKAQSSTDSGGSSGGSSGSETPGTSESATPESSGGSSGGSSEVEFSHEYWMRHALTLAKRAWDEREVPVGAVLVLNNRVIGEGWNRSIGLHDPTAHAEIMALRQGGLVMQNYRLIDATLYVTFEPCVMCAGAMIHSRIGRVVFGVRNAKTGAAGSLMDVLHYPGMNHRVEITEGILADECAALLCYFFRMRRQVFNAQKKAQSSTDSGGSSGGSSGSETPGTSESATPESSGGSSGGSDKKYSIGLAIGTNSVGWAVITDEYKVPSKKFKVLGNTDRHSIKKNLIGALLFDSGETAEATRLKRTARRRYTRRKNRICYLQEIFSNEMAKVDDSFFHRLEESFLVEEDKKHERHPIFGNIVDEVAYHEKYPTIYHLRKKLVDSTDKADLRLIYLALAHMIKFRGHFLIEGDLNPDNSDVDKLFIQLVQTYNQLFEENPINASGVDAKAILSARLSKSRRLENLIAQLPGEKKNGLFGNLIALSLGLTPNFKSNFDLAEDAKLQLSKDTYDDDLDNLLAQIGDQYADLFLAAKNLSDAILLSDILRVNTEITKAPLSASMIKRYDEHHQDLTLLKALVRQQLPEKYKEIFFDQSKNGYAGYIDGGASQEEFYKFIKPILEKMDGTEELLVKLNREDLLRKQRTFDNGSIPHQIHLGELHAILRRQEDFYPFLKDNREKIEKILTFRIPYYVGPLARGNSRFAWMTRKSEETITPWNFEEVVDKGASAQSFIERMTNFDKNLPNEKVLPKHSLLYEYFTVYNELTKVKYVTEGMRKPAFLSGEQKKAIVDLLFKTNRKVTVKQLKEDYFKKIECFDSVEISGVEDRFNASLGTYHDLLKIIKDKDFLDNEENEDILEDIVLTLTLFEDREMIEERLKTYAHLFDDKVMKQLKRRRYTGWGRLSRKLINGIRDKQSGKTILDFLKSDGFANRNFMQLIHDDSLTFKEDIQKAQVSGQGDSLHEHIANLAGSPAIKKGILQTVKVVDELVKVMGRHKPENIVIEMARENQTTQKGQKNSRERMKRIEEGIKELGSQILKEHPVENTQLQNEKLYLYYLQNGRDMYVDQELDINRLSDYDVDHIVPQSFLKDDSIDNKVLTRSDKNRGKSDNVPSEEVVKKMKNYWRQLLNAKLITQRKFDNLTKAERGGLSELDKAGFIKRQLVETRQITKHVAQILDSRMNTKYDENDKLIREVKVITLKSKLVSDFRKDFQFYKVREINNYHHAHDAYLNAVVGTALIKKYPKLESEFVYGDYKVYDVRKMIAKSEQEIGKATAKYFFYSNIMNFFKTEITLANGEIRKRPLIETNGETGEIVWDKGRDFATVRKVLSMPQVNIVKKTEVQTGGFSKESILPKRNSDKLIARKKDWDPKKYGGFDSPTVAYSVLVVAKVEKGKSKKLKSVKELLGITIMERSSFEKNPIDFLEAKGYKEVKKDLIIKLPKYSLFELENGRKRMLASAGELQKGNELALPSKYVNFLYLASHYEKLKGSPEDNEQKQLFVEQHKHYLDEIIEQISEFSKRVILADANLDKVLSAYNKHRDKPIREQAENIIHLFTLTNLGAPAAFKYFDTTIDRKRYTSTKEVLDATLIHQSITGLYETRIDLSQLGGDSGGSPKKKRKV

SEQ ID NO: 100 - protein, 1775 aa, Artificial Sequence
  Synthetic polypeptide
MSEVEFSHEYWMRHALTLAKRAWDEREVPVGAVLVHNNRVIGEGWNRPIGRHDPTAHAEIMALRQGGLVMQNYRLIDATLYVTLEPCVMCAGAMIHSRIGRVVFGARDAKTGAAGSLMDVLHHPGMNHRVEITEGILADECAALLSDFFRMRRQEIKAQKKAQSSTDSGGSSGGSSGSETPGTSESATPESSGGSSGGSSEVEFSHEYWMRHALTLAKRAWDEREVPVGAVLVLNNRVIGEGWNRSIGLHDPTAHAEIMALRQGGLVMQNYRLIDATLYVTFEPCVMCAGAMIHSRIGRVVFGVRNAKTGAAGSLMDVLHYPGMNHRVEITEGILADECNALLCYFFRMRRQVFNAQKKAQSSTDSGGSSGGSSGSETPGTSESATPESSGGSSGGSDKKYSIGLAIGTNSVGWAVITDEYKVPSKKFKVLGNTDRHSIKKNLIGALLFDSGETAEATRLKRTARRRYTRRKNRICYLQEIFSNEMAKVDDSFFHRLEESFLVEEDKKHERHPIFGNIVDEVAYHEKYPTIYHLRKKLVDSTDKADLRLIYLALAHMIKFRGHFLIEGDLNPDNSDVDKLFIQLVQTYNQLFEENPINASGVDAKAILSARLSKSRRLENLIAQLPGEKKNGLFGNLIALSLGLTPNFKSNFDLAEDAKLQLSKDTYDDDLDNLLAQIGDQYADLFLAAKNLSDAILLSDILRVNTEITKAPLSASMIKRYDEHHQDLTLLKALVRQQLPEKYKEIFFDQSKNGYAGYIDGGASQEEFYKFIKPILEKMDGTEELLVKLNREDLLRKQRTFDNGSIPHQIHLGELHAILRRQEDFYPFLKDNREKIEKILTFRIPYYVGPLARGNSRFAWMTRKSEETITPWNFEEVVDKGASAQSFIERMTNFDKNLPNEKVLPKHSLLYEYFTVYNELTKVKYVTEGMRKPAFLSGEQKKAIVDLLFKTNRKVTVKQLKEDYFKKIECFDSVEISGVEDRFNASLGTYHDLLKIIKDKDFLDNEENEDILEDIVLTLTLFEDREMIEERLKTYAHLFDDKVMKQLKRRRYTGWGRLSRKLINGIRDKQSGKTILDFLKSDGFANRNFMQLIHDDSLTFKEDIQKAQVSGQGDSLHEHIANLAGSPAIKKGILQTVKVVDELVKVMGRHKPENIVIEMARENQTTQKGQKNSRERMKRIEEGIKELGSQILKEHPVENTQLQNEKLYLYYLQNGRDMYVDQELDINRLSDYDVDHIVPQSFLKDDSIDNKVLTRSDKNRGKSDNVPSEEVVKKMKNYWRQLLNAKLITQRKFDNLTKAERGGLSELDKAGFIKRQLVETRQITKHVAQILDSRMNTKYDENDKLIREVKVITLKSKLVSDFRKDFQFYKVREINNYHHAHDAYLNAVVGTALIKKYPKLESEFVYGDYKVYDVRKMIAKSEQEIGKATAKYFFYSNIMNFFKTEITLANGEIRKRPLIETNGETGEIVWDKGRDFATVRKVLSMPQVNIVKKTEVQTGGFSKESILPKRNSDKLIARKKDWDPKKYGGFDSPTVAYSVLVVAKVEKGKSKKLKSVKELLGITIMERSSFEKNPIDFLEAKGYKEVKKDLIIKLPKYSLFELENGRKRMLASAGELQKGNELALPSKYVNFLYLASHYEKLKGSPEDNEQKQLFVEQHKHYLDEIIEQISEFSKRVILADANLDKVLSAYNKHRDKPIREQAENIIHLFTLTNLGAPAAFKYFDTTIDRKRYTSTKEVLDATLIHQSITGLYETRIDLSQLGGDSGGSPKKKRKV

SEQ ID NO: 101 - protein, 1775 aa, Artificial Sequence
  Synthetic polypeptide
MSEVEFSHEYWMRHALTLAKRAWDEREVPVGAVLVHNNRVIGEGWNRPIGRHDPTAHAEIMALRQGGLVMQNYRLIDATLYVTLEPCVMCAGAMIHSRIGRVVFGARDAKTGAAGSLMDVLHHPGMNHRVEITEGILADECAALLSDFFRMRRQEIKAQKKAQSSTDSGGSSGGSSGSETPGTSESATPESSGGSSGGSSEVEFSHEYWMRHALTLAKRAWDEREVPVGAVLVLNNRVIGEGWNRAIGLHDPTAHAEIMALRQGGLVMQNYRLIDATLYVTFEPCVMCAGAMIHSRIGRVVFGVRNAKTGAAGSLMDVLHYPGMNHRVEITEGILADECAALLCYFFRMRRQVFNAQKKAQSSTDSGGSSGGSSGSETPGTSESATPESSGGSSGGSDKKYSIGLAIGTNSVGWAVITDEYKVPSKKFKVLGNTDRHSIKKNLIGALLFDSGETAEATRLKRTARRRYTRRKNRICYLQEIFSNEMAKVDDSFFHRLEESFLVEEDKKHERHPIFGNIVDEVAYHEKYPTIYHLRKKLVDSTDKADLRLIYLALAHMIKFRGHFLIEGDLNPDNSDVDKLFIQLVQTYNQLFEENPINASGVDAKAILSARLSKSRRLENLIAQLPGEKKNGLFGNLIALSLGLTPNFKSNFDLAEDAKLQLSKDTYDDDLDNLLAQIGDQYADLFLAAKNLSDAILLSDILRVNTEITKAPLSASMIKRYDEHHQDLTLLKALVRQQLPEKYKEIFFDQSKNGYAGYIDGGASQEEFYKFIKPILEKMDGTEELLVKLNREDLLRKQRTFDNGSIPHQIHLGELHAILRRQEDFYPFLKDNREKIEKILTFRIPYYVGPLARGNSRFAWMTRKSEETITPWNFEEVVDKGASAQSFIERMTNFDKNLPNEKVLPKHSLLYEYFTVYNELTKVKYVTEGMRKPAFLSGEQKKAIVDLLFKTNRKVTVKQLKEDYFKKIECFDSVEISGVEDRFNASLGTYHDLLKIIKDKDFLDNEENEDILEDIVLTLTLFEDREMIEERLKTYAHLFDDKVMKQLKRRRYTGWGRLSRKLINGIRDKQSGKTILDFLKSDGFANRNFMQLIHDDSLTFKEDIQKAQVSGQGDSLHEHIANLAGSPAIKKGILQTVKVVDELVKVMGRHKPENIVIEMARENQTTQKGQKNSRERMKRIEEGIKELGSQILKEHPVENTQLQNEKLYLYYLQNGRDMYVDQELDINRLSDYDVDHIVPQSFLKDDSIDNKVLTRSDKNRGKSDNVPSEEVVKKMKNYWRQLLNAKLITQRKFDNLTKAERGGLSELDKAGFIKRQLVETRQITKHVAQILDSRMNTKYDENDKLIREVKVITLKSKLVSDFRKDFQFYKVREINNYHHAHDAYLNAVVGTALIKKYPKLESEFVYGDYKVYDVRKMIAKSEQEIGKATAKYFFYSNIMNFFKTEITLANGEIRKRPLIETNGETGEIVWDKGRDFATVRKVLSMPQVNIVKKTEVQTGGFSKESILPKRNSDKLIARKKDWDPKKYGGFDSPTVAYSVLVVAKVEKGKSKKLKSVKELLGITIMERSSFEKNPIDFLEAKGYKEVKKDLIIKLPKYSLFELENGRKRMLASAGELQKGNELALPSKYVNFLYLASHYEKLKGSPEDNEQKQLFVEQHKHYLDEIIEQISEFSKRVILADANLDKVLSAYNKHRDKPIREQAENIIHLFTLTNLGAPAAFKYFDTTIDRKRYTSTKEVLDATLIHQSITGLYETRIDLSQLGGDSGGSPKKKRKV

SEQ ID NO: 102 - protein, 1775 aa, Artificial Sequence
  Synthetic polypeptide
MSEVEFSHEYWMRHALTLAKRAWDEREVPVGAVLVHNNRVIGEGWNRPIGRHDPTAHAEIMALRQGGLVMQNYRLIDATLYVTLEPCVMCAGAMIHSRIGRVVFGARDAKTGAAGSLMDVLHHPGMNHRVEITEGILADECAALLSDFFRMRRQEIKAQKKAQSSTDSGGSSGGSSGSETPGTSESATPESSGGSSGGSSEVEFSHEYWMRHALTLAKRAWDEREVPVGAVLVLNNRVIGEGWNRAIGLHDPTAHAEIMALRQGGLVMQNYRLIDATLYVTFEPCVMCAGAMIHSRIGRVVFGVRNAKTGAAGSLMDVLHYPGMNHRVEITEGILADECNALLCYFFRMRRQVFNAQKKAQSSTDSGGSSGGSSGSETPGTSESATPESSGGSSGGSDKKYSIGLAIGTNSVGWAVITDEYKVPSKKFKVLGNTDRHSIKKNLIGALLFDSGETAEATRLKRTARRRYTRRKNRICYLQEIFSNEMAKVDDSFFHRLEESFLVEEDKKHERHPIFGNIVDEVAYHEKYPTIYHLRKKLVDSTDKADLRLIYLALAHMIKFRGHFLIEGDLNPDNSDVDKLFIQLVQTYNQLFEENPINASGVDAKAILSARLSKSRRLENLIAQLPGEKKNGLFGNLIALSLGLTPNFKSNFDLAEDAKLQLSKDTYDDDLDNLLAQIGDQYADLFLAAKNLSDAILLSDILRVNTEITKAPLSASMIKRYDEHHQDLTLLKALVRQQLPEKYKEIFFDQSKNGYAGYIDGGASQEEFYKFIKPILEKMDGTEELLVKLNREDLLRKQRTFDNGSIPHQIHLGELHAILRRQEDFYPFLKDNREKIEKILTFRIPYYVGPLARGNSRFAWMTRKSEETITPWNFEEVVDKGASAQSFIERMTNFDKNLPNEKVLPKHSLLYEYFTVYNELTKVKYVTEGMRKPAFLSGEQKKAIVDLLFKTNRKVTVKQLKEDYFKKIECFDSVEISGVEDRFNASLGTYHDLLKIIKDKDFLDNEENEDILEDIVLTLTLFEDREMIEERLKTYAHLFDDKVMKQLKRRRYTGWGRLSRKLINGIRDKQSGKTILDFLKSDGFANRNFMQLIHDDSLTFKEDIQKAQVSGQGDSLHEHIANLAGSPAIKKGILQTVKVVDELVKVMGRHKPENIVIEMARENQTTQKGQKNSRERMKRIEEGIKELGSQILKEHPVENTQLQNEKLYLYYLQNGRDMYVDQELDINRLSDYDVDHIVPQSFLKDDSIDNKVLTRSDKNRGKSDNVPSEEVVKKMKNYWRQLLNAKLITQRKFDNLTKAERGGLSELDKAGFIKRQLVETRQITKHVAQILDSRMNTKYDENDKLIREVKVITLKSKLVSDFRKDFQFYKVREINNYHHAHDAYLNAVVGTALIKKYPKLESEFVYGDYKVYDVRKMIAKSEQEIGKATAKYFFYSNIMNFFKTEITLANGEIRKRPLIETNGETGEIVWDKGRDFATVRKVLSMPQVNIVKKTEVQTGGFSKESILPKRNSDKLIARKKDWDPKKYGGFDSPTVAYSVLVVAKVEKGKSKKLKSVKELLGITIMERSSFEKNPIDFLEAKGYKEVKKDLIIKLPKYSLFELENGRKRMLASAGELQKGNELALPSKYVNFLYLASHYEKLKGSPEDNEQKQLFVEQHKHYLDEIIEQISEFSKRVILADANLDKVLSAYNKHRDKPIREQAENIIHLFTLTNLGAPAAFKYFDTTIDRKRYTSTKEVLDATLIHQSITGLYETRIDLSQLGGDSGGSPKKKRKV

SEQ ID NO: 103 - protein, 1775 aa, Artificial Sequence
  Synthetic polypeptide
MSEVEFSHEYWMRHALTLAKRAWDEREVPVGAVLVHNNRVIGEGWNRPIGRHDPTAHAEIMALRQGGLVMQNYRLIDATLYVTLEPCVMCAGAMIHSRIGRVVFGARDAKTGAAGSLMDVLHHPGMNHRVEITEGILADECAALLSDFFRMRRQEIKAQKKAQSSTDSGGSSGGSSGSETPGTSESATPESSGGSSGGSSEVEFSHEYWMRHALTLAKRARDEREVPVGAVLVLNNRVIGEGWNRAIGLHDPTAHAEIMALRQGGLVMQNYRLIDATLYVTFEPCVMCAGAMIHSRIGRVVFGVRNAKTGAAGSLMDVLHYPGMNHRVEITEGILADECAALLCYFFRMPRQVFNAQKKAQSSTDSGGSSGGSSGSETPGTSESATPESSGGSSGGSDKKYSIGLAIGTNSVGWAVITDEYKVPSKKFKVLGNTDRHSIKKNLIGALLFDSGETAEATRLKRTARRRYTRRKNRICYLQEIFSNEMAKVDDSFFHRLEESFLVEEDKKHERHPIFGNIVDEVAYHEKYPTIYHLRKKLVDSTDKADLRLIYLALAHMIKFRGHFLIEGDLNPDNSDVDKLFIQLVQTYNQLFEENPINASGVDAKAILSARLSKSRRLENLIAQLPGEKKNGLFGNLIALSLGLTPNFKSNFDLAEDAKLQLSKDTYDDDLDNLLAQIGDQYADLFLAAKNLSDAILLSDILRVNTEITKAPLSASMIKRYDEHHQDLTLLKALVRQQLPEKYKEIFFDQSKNGYAGYIDGGASQEEFYKFIKPILEKMDGTEELLVKLNREDLLRKQRTFDNGSIPHQIHLGELHAILRRQEDFYPFLKDNREKIEKILTFRIPYYVGPLARGNSRFAWMTRKSEETITPWNFEEVVDKGASAQSFIERMTNFDKNLPNEKVLPKHSLLYEYFTVYNELTKVKYVTEGMRKPAFLSGEQKKAIVDLLFKTNRKVTVKQLKEDYFKKIECFDSVEISGVEDRFNASLGTYHDLLKIIKDKDFLDNEENEDILEDIVLTLTLFEDREMIEERLKTYAHLFDDKVMKQLKRRRYTGWGRLSRKLINGIRDKQSGKTILDFLKSDGFANRNFMQLIHDDSLTFKEDIQKAQVSGQGDSLHEHIANLAGSPAIKKGILQTVKVVDELVKVMGRHKPENIVIEMARENQTTQKGQKNSRERMKRIEEGIKELGSQILKEHPVENTQLQNEKLYLYYLQNGRDMYVDQELDINRLSDYDVDHIVPQSFLKDDSIDNKVLTRSDKNRGKSDNVPSEEVVKKMKNYWRQLLNAKLITQRKFDNLTKAERGGLSELDKAGFIKRQLVETRQITKHVAQILDSRMNTKYDENDKLIREVKVITLKSKLVSDFRKDFQFYKVREINNYHHAHDAYLNAVVGTALIKKYPKLESEFVYGDYKVYDVRKMIAKSEQEIGKATAKYFFYSNIMNFFKTEITLANGEIRKRPLIETNGETGEIVWDKGRDFATVRKVLSMPQVNIVKKTEVQTGGFSKESILPKRNSDKLIARKKDWDPKKYGGFDSPTVAYSVLVVAKVEKGKSKKLKSVKELLGITIMERSSFEKNPIDFLEAKGYKEVKKDLIIKLPKYSLFELENGRKRMLASAGELQKGNELALPSKYVNFLYLASHYEKLKGSPEDNEQKQLFVEQHKHYLDEIIEQISEFSKRVILADANLDKVLSAYNKHRDKPIREQAENIIHLFTLTNLGAPAAFKYFDTTIDRKRYTSTKEVLDATLIHQSITGLYETRIDLSQLGGDSGGSPKKKRKV

SEQ ID NO: 104 - protein, 1775 aa, Artificial Sequence
  Synthetic polypeptide
MSEVEFSHEYWMRHALTLAKRAWDEREVPVGAVLVHNNRVIGEGWNRPIGRHDPTAHAEIMALRQGGLVMQNYRLIDATLYVTLEPCVMCAGAMIHSRIGRVVFGARDAKTGAAGSLMDVLHHPGMNHRVEITEGILADECAALLSDFFRMRRQEIKAQKKAQSSTDSGGSSGGSSGSETPGTSESATPESSGGSSGGSSEVEFSHEYWMRHALTLAKRALDEREVPVGAVLVLNNRVIGEGWNRAIGLHDPTAHAEIMALRQGGLVMQNYRLIDATLYVTFEPCVMCAGAMIHSRIGRVVFGVRNAKTGAAGSLMDVLHYPGMNHRVEITEGILADECNALLCYFFRMRRQVFNAQKKAQSSTDSGGSSGGSSGSETPGTSESATPESSGGSSGGSDKKYSIGLAIGTNSVGWAVITDEYKVPSKKFKVLGNTDRHSIKKNLIGALLFDSGETAEATRLKRTARRRYTRRKNRICYLQEIFSNEMAKVDDSFFHRLEESFLVEEDKKHERHPIFGNIVDEVAYHEKYPTIYHLRKKLVDSTDKADLRLIYLALAHMIKFRGHFLIEGDLNPDNSDVDKLFIQLVQTYNQLFEENPINASGVDAKAILSARLSKSRRLENLIAQLPGEKKNGLFGNLIALSLGLTPNFKSNFDLAEDAKLQLSKDTYDDDLDNLLAQIGDQYADLFLAAKNLSDAILLSDILRVNTEITKAPLSASMIKRYDEHHQDLTLLKALVRQQLPEKYKEIFFDQSKNGYAGYIDGGASQEEFYKFIKPILEKMDGTEELLVKLNREDLLRKQRTFDNGSIPHQIHLGELHAILRRQEDFYPFLKDNREKIEKILTFRIPYYVGPLARGNSRFAWMTRKSEETITPWNFEEVVDKGASAQSFIERMTNFDKNLPNEKVLPKHSLLYEYFTVYNELTKVKYVTEGMRKPAFLSGEQKKAIVDLLFKTNRKVTVKQLKEDYFKKIECFDSVEISGVEDRFNASLGTYHDLLKIIKDKDFLDNEENEDILEDIVLTLTLFEDREMIEERLKTYAHLFDDKVMKQLKRRRYTGWGRLSRKLINGIRDKQSGKTILDFLKSDGFANRNFMQLIHDDSLTFKEDIQKAQVSGQGDSLHEHIANLAGSPAIKKGILQTVKVVDELVKVMGRHKPENIVIEMARENQTTQKGQKNSRERMKRIEEGIKELGSQILKEHPVENTQLQNEKLYLYYLQNGRDMYVDQELDINRLSDYDVDHIVPQSFLKDDSIDNKVLTRSDKNRGKSDNVPSEEVVKKMKNYWRQLLNAKLITQRKFDNLTKAERGGLSELDKAGFIKRQLVETRQITKHVAQILDSRMNTKYDENDKLIREVKVITLKSKLVSDFRKDFQFYKVREINNYHHAHDAYLNAVVGTALIKKYPKLESEFVYGDYKVYDVRKMIAKSEQEIGKATAKYFFYSNIMNFFKTEITLANGEIRKRPLIETNGETGEIVWDKGRDFATVRKVLSMPQVNIVKKTEVQTGGFSKESILPKRNSDKLIARKKDWDPKKYGGFDSPTVAYSVLVVAKVEKGKSKKLKSVKELLGITIMERSSFEKNPIDFLEAKGYKEVKKDLIIKLPKYSLFELENGRKRMLASAGELQKGNELALPSKYVNFLYLASHYEKLKGSPEDNEQKQLFVEQHKHYLDEIIEQISEFSKRVILADANLDKVLSAYNKHRDKPIREQAENIIHLFTLTNLGAPAAFKYFDTTIDRKRYTSTKEVLDATLIHQSITGLYETRIDLSQLGGDSGGSPKKKRKV

SEQ ID NO: 105 - protein, 1775 aa, Artificial Sequence
  Synthetic polypeptide
MSEVEFSHEYWMRHALTLAKRAWDEREVPVGAVLVHNNRVIGEGWNRPIGRHDPTAHAEIMALRQGGLVMQNYRLIDATLYVTLEPCVMCAGAMIHSRIGRVVFGARDAKTGAAGSLMDVLHHPGMNHRVEITEGILADECAALLSDFFRMRRQEIKAQKKAQSSTDSGGSSGGSSGSETPGTSESATPESSGGSSGGSSEVEFSHEYWMRHALTLAKRALDEREVPVGAVLVLNNRVIGEGWNRAIGLHDPTAHAEIMALRQGGLVMQNYRLIDATLYVTFEPCVMCAGAMIHSRIGRVVFGVRNAKTGAAGSLMDVLHYPGMNHRVEITEGILADECNALLCYFFRMPRQVFNAQKKAQSSTDSGGSSGGSSGSETPGTSESATPESSGGSSGGSDKKYSIGLAIGTNSVGWAVITDEYKVPSKKFKVLGNTDRHSIKKNLIGALLFDSGETAEATRLKRTARRRYTRRKNRICYLQEIFSNEMAKVDDSFFHRLEESFLVEEDKKHERHPIFGNIVDEVAYHEKYPTIYHLRKKLVDSTDKADLRLIYLALAHMIKFRGHFLIEGDLNPDNSDVDKLFIQLVQTYNQLFEENPINASGVDAKAILSARLSKSRRLENLIAQLPGEKKNGLFGNLIALSLGLTPNFKSNFDLAEDAKLQLSKDTYDDDLDNLLAQIGDQYADLFLAAKNLSDAILLSDILRVNTEITKAPLSASMIKRYDEHHQDLTLLKALVRQQLPEKYKEIFFDQSKNGYAGYIDGGASQEEFYKFIKPILEKMDGTEELLVKLNREDLLRKQRTFDNGSIPHQIHLGELHAILRRQEDFYPFLKDNREKIEKILTFRIPYYVGPLARGNSRFAWMTRKSEETITPWNFEEVVDKGASAQSFIERMTNFDKNLPNEKVLPKHSLLYEYFTVYNELTKVKYVTEGMRKPAFLSGEQKKAIVDLLFKTNRKVTVKQLKEDYFKKIECFDSVEISGVEDRFNASLGTYHDLLKIIKDKDFLDNEENEDILEDIVLTLTLFEDREMIEERLKTYAHLFDDKVMKQLKRRRYTGWGRLSRKLINGIRDKQSGKTILDFLKSDGFANRNFMQLIHDDSLTFKEDIQKAQVSGQGDSLHEHIANLAGSPAIKKGILQTVKVVDELVKVMGRHKPENIVIEMARENQTTQKGQKNSRERMKRIEEGIKELGSQILKEHPVENTQLQNEKLYLYYLQNGRDMYVDQELDINRLSDYDVDHIVPQSFLKDDSIDNKVLTRSDKNRGKSDNVPSEEVVKKMKNYWRQLLNAKLITQRKFDNLTKAERGGLSELDKAGFIKRQLVETRQITKHVAQILDSRMNTKYDENDKLIREVKVITLKSKLVSDFRKDFQFYKVREINNYHHAHDAYLNAVVGTALIKKYPKLESEFVYGDYKVYDVRKMIAKSEQEIGKATAKYFFYSNIMNFFKTEITLANGEIRKRPLIETNGETGEIVWDKGRDFATVRKVLSMPQVNIVKKTEVQTGGFSKESILPKRNSDKLIARKKDWDPKKYGGFDSPTVAYSVLVVAKVEKGKSKKLKSVKELLGITIMERSSFEKNPIDFLEAKGYKEVKKDLIIKLPKYSLFELENGRKRMLASAGELQKGNELALPSKYVNFLYLASHYEKLKGSPEDNEQKQLFVEQHKHYLDEIIEQISEFSKRVILADANLDKVLSAYNKHRDKPIREQAENIIHLFTLTNLGAPAAFKYFDTTIDRKRYTSTKEVLDATLIHQSITGLYETRIDLSQLGGDSGGSPKKKRKV

SEQ ID NO: 106 - protein, 1775 aa, Artificial Sequence; identical to SEQ ID NO: 103
  Synthetic polypeptide

SEQ ID NO: 107 - protein, 1767 aa, Artificial Sequence
  Synthetic polypeptide
MSEVEFSHEYWMRHALTLAKRAWDEREVPVGAVLVHNNRVIGEGWNRPIGRHDPTAHAEIMALRQGGLVMQNYRLIDATLYVTLEPCVMCAGAMIHSRIGRVVFGARDAKTGAAGSLMDVLHHPGMNHRVEITEGILADECAALLSDFFRMRRQEIKAQKKAQSSTDSGGSSGGSSGSETPGTSESATPESSGGSSGGSSEVEFSHEYWMRHALTLAKRAWDEREVPVGAVLVLNNRVIGEGWNRAIGLHDPTAHAEIMALRQGGLVMQNYRLIDATLYVTFEPCVMCAGAMIHSRIGRVVFGVRNAKTGAAGSLMDVLHYPGMNHRVEITEGILADECAALLCYFFRMPRQVFNAQKKAQSSTDSGGSSGGSSGSETPGTSESATPESDKKYSIGLAIGTNSVGWAVITDEYKVPSKKFKVLGNTDRHSIKKNLIGALLFDSGETAEATRLKRTARRRYTRRKNRICYLQEIFSNEMAKVDDSFFHRLEESFLVEEDKKHERHPIFGNIVDEVAYHEKYPTIYHLRKKLVDSTDKADLRLIYLALAHMIKFRGHFLIEGDLNPDNSDVDKLFIQLVQTYNQLFEENPINASGVDAKAILSARLSKSRRLENLIAQLPGEKKNGLFGNLIALSLGLTPNFKSNFDLAEDAKLQLSKDTYDDDLDNLLAQIGDQYADLFLAAKNLSDAILLSDILRVNTEITKAPLSASMIKRYDEHHQDLTLLKALVRQQLPEKYKEIFFDQSKNGYAGYIDGGASQEEFYKFIKPILEKMDGTEELLVKLNREDLLRKQRTFDNGSIPHQIHLGELHAILRRQEDFYPFLKDNREKIEKILTFRIPYYVGPLARGNSRFAWMTRKSEETITPWNFEEVVDKGASAQSFIERMTNFDKNLPNEKVLPKHSLLYEYFTVYNELTKVKYVTEGMRKPAFLSGEQKKAIVDLLFKTNRKVTVKQLKEDYFKKIECFDSVEISGVEDRFNASLGTYHDLLKIIKDKDFLDNEENEDILEDIVLTLTLFEDREMIEERLKTYAHLFDDKVMKQLKRRRYTGWGRLSRKLINGIRDKQSGKTILDFLKSDGFANRNFMQLIHDDSLTFKEDIQKAQVSGQGDSLHEHIANLAGSPAIKKGILQTVKVVDELVKVMGRHKPENIVIEMARENQTTQKGQKNSRERMKRIEEGIKELGSQILKEHPVENTQLQNEKLYLYYLQNGRDMYVDQELDINRLSDYDVDHIVPQSFLKDDSIDNKVLTRSDKNRGKSDNVPSEEVVKKMKNYWRQLLNAKLITQRKFDNLTKAERGGLSELDKAGFIKRQLVETRQITKHVAQILDSRMNTKYDENDKLIREVKVITLKSKLVSDFRKDFQFYKVREINNYHHAHDAYLNAVVGTALIKKYPKLESEFVYGDYKVYDVRKMIAKSEQEIGKATAKYFFYSNIMNFFKTEITLANGEIRKRPLIETNGETGEIVWDKGRDFATVRKVLSMPQVNIVKKTEVQTGGFSKESILPKRNSDKLIARKKDWDPKKYGGFDSPTVAYSVLVVAKVEKGKSKKLKSVKELLGITIMERSSFEKNPIDFLEAKGYKEVKKDLIIKLPKYSLFELENGRKRMLASAGELQKGNELALPSKYVNFLYLASHYEKLKGSPEDNEQKQLFVEQHKHYLDEIIEQISEFSKRVILADANLDKVLSAYNKHRDKPIREQAENIIHLFTLTNLGAPAAFKYFDTTIDRKRYTSTKEVLDATLIHQSITGLYETRIDLSQLGGDSGGSPKKKRKV

SEQ ID NO: 108 - protein, 1767 aa, Artificial Sequence
  Synthetic polypeptide
MSEVEFSHEYWMRHALTLAKRAWDEREVPVGAVLVHNNRVIGEGWNRPIGRHDPTAHAEIMALRQGGLVMQNYRLIDATLYVTLEPCVMCAGAMIHSRIGRVVFGARDAKTGAAGSLMDVLHHPGMNHRVEITEGILADECAALLSDFFRMRRQEIKAQKKAQSSTDSGGSSGGSSGSETPGTSESATPESSGGSSGGSSEVEFSHEYWMRHALTLAKRAWDEREVPVGAVLVLNNRVIGEGWNRAIGLHDPTAHAEIMALRQGGLVMQNYRLIDATLYVTFEPCVMCAGAMIHSRIGRVVFGVRNAKTGAAGSLMDVLHYPGMNHRVEITEGILADECNALLCYFFRMPRQVFNAQKKAQSSTDSGGSSGGSSGSETPGTSESATPESDKKYSIGLAIGTNSVGWAVITDEYKVPSKKFKVLGNTDRHSIKKNLIGALLFDSGETAEATRLKRTARRRYTRRKNRICYLQEIFSNEMAKVDDSFFHRLEESFLVEEDKKHERHPIFGNIVDEVAYHEKYPTIYHLRKKLVDSTDKADLRLIYLALAHMIKFRGHFLIEGDLNPDNSDVDKLFIQLVQTYNQLFEENPINASGVDAKAILSARLSKSRRLENLIAQLPGEKKNGLFGNLIALSLGLTPNFKSNFDLAEDAKLQLSKDTYDDDLDNLLAQIGDQYADLFLAAKNLSDAILLSDILRVNTEITKAPLSASMIKRYDEHHQDLTLLKALVRQQLPEKYKEIFFDQSKNGYAGYIDGGASQEEFYKFIKPILEKMDGTEELLVKLNREDLLRKQRTFDNGSIPHQIHLGELHAILRRQEDFYPFLKDNREKIEKILTFRIPYYVGPLARGNSRFAWMTRKSEETITPWNFEEVVDKGASAQSFIERMTNFDKNLPNEKVLPKHSLLYEYFTVYNELTKVKYVTEGMRKPAFLSGEQKKAIVDLLFKTNRKVTVKQLKEDYFKKIECFDSVEISGVEDRFNASLGTYHDLLKIIKDKDFLDNEENEDILEDIVLTLTLFEDREMIEERLKTYAHLFDDKVMKQLKRRRYTGWGRLSRKLINGIRDKQSGKTILDFLKSDGFANRNFMQLIHDDSLTFKEDIQKAQVSGQGDSLHEHIANLAGSPAIKKGILQTVKVVDELVKVMGRHKPENIVIEMARENQTTQKGQKNSRERMKRIEEGIKELGSQILKEHPVENTQLQNEKLYLYYLQNGRDMYVDQELDINRLSDYDVDHIVPQSFLKDDSIDNKVLTRSDKNRGKSDNVPSEEVVKKMKNYWRQLLNAKLITQRKFDNLTKAERGGLSELDKAGFIKRQLVETRQITKHVAQILDSRMNTKYDENDKLIREVKVITLKSKLVSDFRKDFQFYKVREINNYHHAHDAYLNAVVGTALIKKYPKLESEFVYGDYKVYDVRKMIAKSEQEIGKATAKYFFYSNIMNFFKTEITLANGEIRKRPLIETNGETGEIVWDKGRDFATVRKVLSMPQVNIVKKTEVQTGGFSKESILPKRNSDKLIARKKDWDPKKYGGFDSPTVAYSVLVVAKVEKGKSKKLKSVKELLGITIMERSSFEKNPIDFLEAKGYKEVKKDLIIKLPKYSLFELENGRKRMLASAGELQKGNELALPSKYVNFLYLASHYEKLKGSPEDNEQKQLFVEQHKHYLDEIIEQISEFSKRVILADANLDKVLSAYNKHRDKPIREQAENIIHLFTLTNLGAPAAFKYFDTTIDRKRYTSTKEVLDATLIHQSITGLYETRIDLSQLGGDSGGSPKKKRKV

SEQ ID NO: 109 - protein, 1767 aa, Artificial Sequence
  Synthetic polypeptide
MSEVEFSHEYWMRHALTLAKRAWDEREVPVGAVLVHNNRVIGEGWNRPIGRHDPTAHAEIMALRQGGLVMQNYRLIDATLYVTLEPCVMCAGAMIHSRIGRVVFGARDAKTGAAGSLMDVLHHPGMNHRVEITEGILADECAALLSDFFRMRRQEIKAQKKAQSSTDSGGSSGGSSGSETPGTSESATPESSGGSSGGSSEVEFSHEYWMRHALTLAKRALDEREVPVGAVLVLNNRVIGEGWNRAIGLHDPTAHAEIMALRQGGLVMQNYRLIDATLYVTFEPCVMCAGAMIHSRIGRVVFGVRNAKTGAAGSLMDVLHYPGMNHRVEITEGILADECAALLCYFFRMPRQVFNAQKKAQSSTDSGGSSGGSSGSETPGTSESATPESDKKYSIGLAIGTNSVGWAVITDEYKVPSKKFKVLGNTDRHSIKKNLIGALLFDSGETAEATRLKRTARRRYTRRKNRICYLQEIFSNEMAKVDDSFFHRLEESFLVEEDKKHERHPIFGNIVDEVAYHEKYPTIYHLRKKLVDSTDKADLRLIYLALAHMIKFRGHFLIEGDLNPDNSDVDKLFIQLVQTYNQLFEENPINASGVDAKAILSARLSKSRRLENLIAQLPGEKKNGLFGNLIALSLGLTPNFKSNFDLAEDAKLQLSKDTYDDDLDNLLAQIGDQYADLFLAAKNLSDAILLSDILRVNTEITKAPLSASMIKRYDEHHQDLTLLKALVRQQLPEKYKEIFFDQSKNGYAGYIDGGASQEEFYKFIKPILEKMDGTEELLVKLNREDLLRKQRTFDNGSIPHQIHLGELHAILRRQEDFYPFLKDNREKIEKILTFRIPYYVGPLARGNSRFAWMTRKSEETITPWNFEEVVDKGASAQSFIERMTNFDKNLPNEKVLPKHSLLYEYFTVYNELTKVKYVTEGMRKPAFLSGEQKKAIVDLLFKTNRKVTVKQLKEDYFKKIECFDSVEISGVEDRFNASLGTYHDLLKIIKDKDFLDNEENEDILEDIVLTLTLFEDREMIEERLKTYAHLFDDKVMKQLKRRRYTGWGRLSRKLINGIRDKQSGKTILDFLKSDGFANRNFMQLIHDDSLTFKEDIQKAQVSGQGDSLHEHIANLAGSPAIKKGILQTVKVVDELVKVMGRHKPENIVIEMARENQTTQKGQKNSRERMKRIEEGIKELGSQILKEHPVENTQLQNEKLYLYYLQNGRDMYVDQELDINRLSDYDVDHIVPQSFLKDDSIDNKVLTRSDKNRGKSDNVPSEEVVKKMKNYWRQLLNAKLITQRKFDNLTKAERGGLSELDKAGFIKRQLVETRQITKHVAQILDSRMNTKYDENDKLIREVKVITLKSKLVSDFRKDFQFYKVREINNYHHAHDAYLNAVVGTALIKKYPKLESEFVYGDYKVYDVRKMIAKSEQEIGKATAKYFFYSNIMNFFKTEITLANGEIRKRPLIETNGETGEIVWDKGRDFATVRKVLSMPQVNIVKKTEVQTGGFSKESILPKRNSDKLIARKKDWDPKKYGGFDSPTVAYSVLVVAKVEKGKSKKLKSVKELLGITIMERSSFEKNPIDFLEAKGYKEVKKDLIIKLPKYSLFELENGRKRMLASAGELQKGNELALPSKYVNFLYLASHYEKLKGSPEDNEQKQLFVEQHKHYLDEIIEQISEFSKRVILADANLDKVLSAYNKHRDKPIREQAENIIHLFTLTNLGAPAAFKYFDTTIDRKRYTSTKEVLDATLIHQSITGLYETRIDLSQLGGDSGGSPKKKRKV

SEQ ID NO: 110 - protein, 1775 aa, Artificial Sequence; identical to SEQ ID NO: 99
  Synthetic polypeptide

SEQ ID NO: 111 - protein, 1775 aa, Artificial Sequence; identical to SEQ ID NO: 100
  Synthetic polypeptide

SEQ ID NO: 112 - protein, 1775 aa, Artificial Sequence; identical to SEQ ID NO: 104
  Synthetic polypeptide

SEQ ID NO: 113 - protein, 1773 aa, Artificial Sequence
  Synthetic polypeptide
MSEVEFSHEYWMRHALTLAKRAWDEREVPVGAVLVHNNRVIGEGWNRPIGRHDPTAHAEIMALRQGGLVMQNYRLIDATLYVTLEPCVMCAGAMIHSRIGRVVFGARDAKTGAAGSLMDVLHHPGMNHRVEITEGILADECAALLSDFFRMRRQEIKAQKKAQSSTDSGGSSGGSSGSETPGTSESATPESSGGSSGGSSEVEFSHEYWMRHALTLAKRALDEREVPVGAVLVLNNRGEGWNRAIGLHDPTAHAEIMALRQGGLVMQNYRLIDATLYVTFEPCVMCAGAMIHSRIGRVVFGVRNAKTGAAGSLMDVLHYPGMNHRVEITEGILADECNALLCYFFRMPRQVFNAQKKAQSSTDSGGSSGGSSGSETPGTSESATPESSGGSSGGSDKKYSIGLAIGTNSVGWAVITDEYKVPSKKFKVLGNTDRHSIKKNLIGALLFDSGETAEATRLKRTARRRYTRRKNRICYLQEIFSNEMAKVDDSFFHRLEESFLVEEDKKHERHPIFGNIVDEVAYHEKYPTIYHLRKKLVDSTDKADLRLIYLALAHMIKFRGHFLIEGDLNPDNSDVDKLFIQLVQTYNQLFEENPINASGVDAKAILSARLSKSRRLENLIAQLPGEKKNGLFGNLIALSLGLTPNFKSNFDLAEDAKLQLSKDTYDDDLDNLLAQIGDQYADLFLAAKNLSDAILLSDILRVNTEITKAPLSASMIKRYDEHHQDLTLLKALVRQQLPEKYKEIFFDQSKNGYAGYIDGGASQEEFYKFIKPILEKMDGTEELLVKLNREDLLRKQRTFDNGSIPHQIHLGELHAILRRQEDFYPFLKDNREKIEKILTFRIPYYVGPLARGNSRFAWMTRKSEETITPWNFEEVVDKGASAQSFIERMTNFDKNLPNEKVLPKHSLLYEYFTVYNELTKVKYVTEGMRKPAFLSGEQKKAIVDLLFKTNRKVTVKQLKEDYFKKIECFDSVEISGVEDRFNASLGTYHDLLKIIKDKDFLDNEENEDILEDIVLTLTLFEDREMIEERLKTYAHLFDDKVMKQLKRRRYTGWGRLSRKLINGIRDKQSGKTILDFLKSDGFANRNFMQLIHDDSLTFKEDIQKAQVSGQGDSLHEHIANLAGSPAIKKGILQTVKVVDELVKVMGRHKPENIVIEMARENQTTQKGQKNSRERMKRIEEGIKELGSQILKEHPVENTQLQNEKLYLYYLQNGRDMYVDQELDINRLSDYDVDHIVPQSFLKDDSIDNKVLTRSDKNRGKSDNVPSEEVVKKMKNYWRQLLNAKLITQRKFDNLTKAERGGLSELDKAGFIKRQLVETRQITKHVAQILDSRMNTKYDENDKLIREVKVITLKSKLVSDFRKDFQFYKVREINNYHHAHDAYLNAVVGTALIKKYPKLESEFVYGDYKVYDVRKMIAKSEQEIGKATAKYFFYSNIMNFFKTEITLANGEIRKRPLIETNGETGEIVWDKGRDFATVRKVLSMPQVNIVKKTEVQTGGFSKESILPKRNSDKLIARKKDWDPKKYGGFDSPTVAYSVLVVAKVEKGKSKKLKSVKELLGITIMERSSFEKNPIDFLEAKGYKEVKKDLIIKLPKYSLFELENGRKRMLASAGELQKGNELALPSKYVNFLYLASHYEKLKGSPEDNEQKQLFVEQHKHYLDEIIEQISEFSKRVILADANLDKVLSAYNKHRDKPIREQAENIIHLFTLTNLGAPAAFKYFDTTIDRKRYTSTKEVLDATLIHQSITGLYETRIDLSQLGGDSGGSPKKKRKV

SEQ ID NO: 114 - protein, 1775 aa, Artificial Sequence; identical to SEQ ID NO: 103
  Synthetic polypeptide

SEQ ID NO: 115 - protein, 1803 aa, Artificial Sequence
  Synthetic polypeptide
MKRTADGSEFESPKKKRKVSEVEFSHEYWMRHALTLAKRAWDEREVPVGAVLVHNNRVIGEGWNRPIGRHDPTAHAEIMALRQGGLVMQNYRLIDATLYVTLEPCVMCAGAMIHSRIGRVVFGARDAKTGAAGSLMDVLHHPGMNHRVEITEGILADECAALLSDFFRMRRQEIKAQKKAQSSTDSGGSSGGSSGSETPGTSESATPESSGGSSGGSSEVEFSHEYWMRHALTLAKRARDEREVPVGAVLVLNNRVIGEGWNRAIGLHDPTAHAEIMALRQGGLVMQNYRLIDATLYVTFEPCVMCAGAMIHSRIGRVVFGVRNAKTGAAGSLMDVLHYPGMNHRVEITEGILADECAALLCYFFRMPRQVFNAQKKAQSSTDSGGSSGGSSGSETPGTSESATPESSGGSSGGSDKKYSIGLAIGTNSVGWAVITDEYKVPSKKFKVLGNTDRHSIKKNLIGALLFDSGETAEATRLKRTARRRYTRRKNRICYLQEIFSNEMAKVDDSFFHRLEESFLVEEDKKHERHPIFGNIVDEVAYHEKYPTIYHLRKKLVDSTDKADLRLIYLALAHMIKFRGHFLIEGDLNPDNSDVDKLFIQLVQTYNQLFEENPINASGVDAKAILSARLSKSRRLENLIAQLPGEKKNGLFGNLIALSLGLTPNFKSNFDLAEDAKLQLSKDTYDDDLDNLLAQIGDQYADLFLAAKNLSDAILLSDILRVNTEITKAPLSASMIKRYDEHHQDLTLLKALVRQQLPEKYKEIFFDQSKNGYAGYIDGGASQEEFYKFIKPILEKMDGTEELLVKLNREDLLRKQRTFDNGSIPHQIHLGELHAILRRQEDFYPFLKDNREKIEKILTFRIPYYVGPLARGNSRFAWMTRKSEETITPWNFEEVVDKGASAQSFIERMTNFDKNLPNEKVLPKHSLLYEYFTVYNELTKVKYVTEGMRKPAFLSGEQKKAIVDLLFKTNRKVTVKQLKEDYFKKIECFDSVEISGVEDRFNASLGTYHDLLKIIKDKDFLDNEENEDILEDIVLTLTLFEDREMIEERLKTYAHLFDDKVMKQLKRRRYTGWGRLSRKLINGIRDKQSGKTILDFLKSDGFANRNFMQLIHDDSLTFKEDIQKAQVSGQGDSLHEHIANLAGSPAIKKGILQTVKVVDELVKVMGRHKPENIVIEMARENQTTQKGQKNSRERMKRIEEGIKELGSQILKEHPVENTQLQNEKLYLYYLQNGRDMYVDQELDINRLSDYDVDHIVPQSFLKDDSIDNKVLTRSDKNRGKSDNVPSEEVVKKMKNYWRQLLNAKLITQRKFDNLTKAERGGLSELDKAGFIKRQLVETRQITKHVAQILDSRMNTKYDENDKLIREVKVITLKSKLVSDFRKDFQFYKVREINNYHHAHDAYLNAVVGTALIKKYPKLESEFVYGDYKVYDVRKMIAKSEQEIGKATAKYFFYSNIMNFFKTEITLANGEIRKRPLIETNGETGEIVWDKGRDFATVRKVLSMPQVNIVKKTEVQTGGFSKESILPKRNSDKLIARKKDWDPKKYGGFVSPTVAYSVLVVAKVEKGKSKKLKSVKELLGITIMERSSFEKNPIDFLEAKGYKEVKKDLIIKLPKYSLFELENGRKRMLASARELQKGNELALPSKYVNFLYLASHYEKLKGSPEDNEQKQLFVEQHKHYLDEIIEQISEFSKRVILADANLDKVLSAYNKHRDKPIREQAENIIHLFTLTNLGAPAAFKYFDTTIDRKQYRSTKEVLDATLIHQSITGLYETRIDLSQLGGDSGGSKRTADGSEFEPKKKRKV

SEQ ID NO: 116 - RNA, 11 nt, Artificial Sequence
  Synthetic polynucleotide
ugagccgcugg

SEQ ID NO: 117 - protein, 30 aa, Artificial Sequence
  Synthetic polypeptide
  misc_feature (2)..(30): may be absent
GGGGGGGGGGGGGGGGGGGGGGGGGGGGGG

SEQ ID NO: 118 - protein, 90 aa, Artificial Sequence
  Synthetic polypeptide
  misc_feature (4)..(90): may be absent
GGSGGSGGSGGSGGSGGSGGSGGSGGSGGSGGSGGSGGSGGSGGSGGSGGSGGSGGSGGSGGSGGSGGSGGSGGSGGSGGSGGSGGSGGS

SEQ ID NO: 119 - protein, 60 aa, Artificial Sequence
  Synthetic polypeptide
  misc_feature (1)..(1): Xaa can be any naturally occurring amino acid
  misc_feature (3)..(60): may be absent
XPXPXPXPXPXPXPXPXPXPXPXPXPXPXPXPXPXPXPXPXPXPXPXPXPXPXPXPXPXP

SEQ ID NO: 120 - protein, 21 aa, Artificial Sequence
  Synthetic polypeptide
  misc_feature (4)..(21): may be absent
GGSGGSGGSGGSGGSGGSGGS

SEQ ID NO: 121 - RNA, 10 nt, Artificial Sequence
  Synthetic polynucleotide
ugagccgcug

SEQ ID NO: 122 - protein, 1803 aa, Artificial Sequence; identical to SEQ ID NO: 115
  Synthetic polypeptide

SEQ ID NO: 123 - protein, 102 aa, Artificial Sequence
  Synthetic polypeptide
CLSYETEILTVEYGLLPIGKIVEKRIECTVYSVDNNGNIYTQPVAQWHDRGEQEVFEYCLEDGSLIRATKDHKFMTVDGQMLPIDEIFERELDLMRVDNLPN

SEQ ID NO: 124 - protein, 36 aa, Artificial Sequence
  Synthetic polypeptide
MIKIATRKYLGKQNVYDIGVERDHNFALKNGFIASN
